United States Patent Application Publication US 2026/0271966 A1 - sequence listing, part 3

SEQ ID NO: 5 - DNA, 4089676 bp, Bacillus subtilis (residues 1-2,044,838 of 4,089,676)
  source 1..4089676: mol_type = genomic DNA; strain = Strain 105 ELA191105 ATCC PTA 126786
atggaaaatatattagacctgtggaaccaagcccttgctcaaatcgaaaaaaagttgagcaaaccgagttttgagacttggatgaagtcaaccaaagcccactcactgcaaggcgatacattaacaatcacggctcccaatgaatttgccagagactggctggagtccagatacttgcatctgattgcagatactatatatgaattaaccggggaagaattgagcattaagtttgtcattcctcaaaatcaagatgttgaggactttatgccgaaaccgcaagtcaaaaaagcggtcaaagaagatacatctgattttcctcaaaatatgctcaatccaaaatatacttttgatacttttgtcatcggatctggaaaccgatttgcacacgctgcttccctcgcagtagcggaagcacccgcgaaagcttacaaccctttatttatctatgggggcgtcggcttagggaaaacgcacttaatgcatgcgatcggccattatgtaatagatcataatccttctgccaaagtggtttatctgtcttctgagaaatttacaaacgaattcatcaactctatccgagataataaagccgtcgacttccgcaatcgctatcgaaatgttgatgtgcttttgatagatgatattcaatttttagcggggaaagaacaaacccaggaagaatttttccatacatttaacacattgcacgaagaaagcaaacaaatcgtcatttcaagtgatcgaccgccaaaggaaattccgacacttgaggacagattgcgctcacgttttgaatggggacttattacagatatcacaccgcctgatctagaaacgagaattgcgattttaagaaaaaaagccaaagcagaaggcctcgatattccgaacgaggttatgctttacatcgcgaatcaaatcgacagcaatattcgggaactcgaaggagcattaatcagagttgtcgcttattcatctttaattaataaagatattaatgctgatctggccgctgaggcgttgaaagatattattccttcctcaaaaccgaaagtcattacgataaaagaaattcagagggtagtaggccagcaatttaatattaaactcgaggatttcaaagcaaaaaaacggacaaagtcagtagcttttccgcgtcaaatcgccatgtacttatcaagggaaatgactgattcctctcttcctaaaatcggtgaagagtttggaggacgtgatcatacgaccgttattcatgcgcatgaaaaaatttcaaaactgctggcagatgatgaacagcttcagcagcatgtaaaagaaattaaagaacagcttaaatagcaggaccggggatcaatcggggaaagtgtgaataacttttcggaagtcatacacagtctgtccacatgtggataggctgtgtttcctgtctttttcacaacttatccacaaatccacaggccctactattacttctactattttttataaatatatatattaatacattatccgttaggaggataaaaatgaaattcacgattcaaaaagatcgtcttgttgaaagtgtccaagatgtattaaaagcagtttcatccagaaccacgattcccattctgactggtattaaaattgttgcatcagatgatggagtatcctttacagggagtgactcagatatttctattgaatccttcattccaaaagaagaaggagataaagaaattgtcactattgaacagcccggaagcatcgttttacaggctcgcttttttagtgaaattgtaaaaaaattgccgatggcaactgtagaaatcgaagtccaaaatcagtatttgacgattatccgttctggtaaagctgaatttaatctaaacggactggatgctgatgagtatccgcacttgcctcagattgaagagcatcatgcgattcagatcccaactgatttgttaaaaaatctaatcagacaaacagtatttgcagtgtccacctcagaaacacgccctatcttgacaggtgtaaactggaaagtggagcaaagtgaattattatgcactgcaacggatagccaccgtcttgcattaagaaaggcaaaacttgatattccagaagacagatcttataacgtcgtgattccgggaaaaagtttaactgaactcagcaagattttagatgacaaccaagaacttgtagatatcgtcatcacagaaacccaagttctgtttaaagcgaaaaacgtcttattcttctcacggcttctggacgggaattatccagacacaaccagcctgattccgcaagacagcaaaacagaaatcattgtgaacacaaaagaattccttcaggccattgatcgtgcatctcttttagctagagagggacgcaacaacgttgtaaaactgtccgcaaaaccggctgaatccattgaaatttcttccaactccccggaaatcggtaaagttgtggaagcaattgctgcggatcaaattgaaggtgaggaattaaatatctcttttagtccaaaatatatgctggatgcactaaaggtgcttgaaggagcagaaatacgcgtaagctttacaggcgcaatgagacctttcttaattcgcacgccgaatgatgaaacgattgtacagcttatcctccctgtcagaacctattaatccgatacactgctgccgacccgtcggcagcttttctattcggtatctgctccgacaagttttccctttccctaattcgtttttttttagtacaattagatattagtgatatttgaaagaggtcgatataatggcaaatccgatttcaattgatacagagatgattacactcggacaattcttaaaattagccgatgtgattcagtctggcggtatggcgaagtggtttttaagcgagcatgaagtgcttgtgaacgatgagccggacaaccgccggggcagaaaactgtatgttggagatgtggtagagattgaaggatttggttcatttcaagtcgtcaattaaagcgggtgacactgattgtatatccagaacttagaactgacatcttaccgcaactacgaccatgctgaacttcaatttgaaaataaagtaaatgtgatcatcggagaaaacgcccaggggaagacaaacctcatggaggcgatctatgtcttgtccatggcgaaatcgcaccggacatcaaatgacaaagaacttatacggtgggacaaagactatgctaaaatagagggaagagtgatgaagcaaaacggggcgatcccgatgcagctcgtcatctccaaaaagggtaaaaagggcaaggtcaatcatattgaacagcaaaagctcagccagtatgtcggagccctcaacaccattatgttcgcgccggaagatttaaatcttgtaaagggaagccctcaagtgagaaggcggtttcttgacatggaaatcggacaggtttctctcgtctaccttcatgatctttctctttaccagaaaatcctttcccagcggaatcattttttgaaacagctgcaaacaagaaaacaaactgaccggacgatgctcgatgttctgaccgatcagcttgtagaagttgcagcaaaagtcgtcgtaaaacgcctgcagtttacagcacagctcgagaaatgggcgcagcccatccatgcaggcatctcaagagggcttgaagaactgaccctgaaataccatacagctcttgaggtatcagatcccctagatttgtcgaaaataggagatagctatcaagaagcgttttctaaattaagagaaaaagaaattgagcgtggtgtgacgctgtcagggcctcatcgcgatgatgttcttttctatgtgaacggacgcgatgtgcagacgtatggttctcaaggacagcagcgaacgacggcgttgtcccttaagctggcggagattgacctgatccatgaagaaatcggagaatatcccattttactattggatgatgtactgagtgaactggatgattatcgccagtcacacttgcttcatacgatccaaggccgtgtacaaacgtttgtcacaacgacaagcgttgatggcattgatcacgaaaccttacgtcaagcaggaatgttccgtgtgcaaaatggtgcgttagtgaagtgaagaaatgaggtgagcaattgtatattcatttaggtgatgactttgtggtttcaacacgagatattgtcggcatttttgactttaaagccaacatgtcgcctattgttgaagaatttctgaaaaaacagaaacacaaggtggtgcctttcgtaaacggcacgcccaaatctatcgtagtcacggttcagaatatatattactctcccttatcttccagcacattaaaaaaacgtgcgcaatttatgtttgaaatagattcttagaaattttttatcacgaatatatcgtttagaaaagtgtaggtgaatgacgtggctatggaacagcagcaaaacagttatgatgaaaatcagatacaggtactagaaggattggaagctgttcgtaaaagaccggggatgtatatcggttcgacaaacagcaaaggccttcaccacctggtatgggaaattgtcgacaatagtattgacgaagccctcgccggttattgtacggatatcaatatccaaatcgaaaaagacaacagtatcacggttgtagataatggccgcggtattccagtcggtattcatgaaaaaatgggccgtcctgcggtagaagtcattatgacggtacttcatgccggaggaaaatttgacggaagcggctataaagtatccggaggattacacggtgtaggtgcgtctgtcgtaaacgcactatcaacagagcttgatgtgacggttcaccgtgacggtaaaattcaccgccaaacttataaacgcggagttccggttacagaccttgaaatcattggcgaaacggatcatacaggaacgacgacacattttgtcccggaccctgaaattttctcagaaacaaccgagtatgattatgatctgcttgccaaccgcgtacgtgaattagcctttttaacaaagggcgtaaacatcacgattgaggataaacgtgaaggacaagagcgcaaaaatgaataccattacgaaggcggaattaaaagttatgtagagtatttaaaccgctctaaagaggttgtccatgaagagccgatttacattgaaggcgaaaaggacggcattacggttgaagtggctttgcaatacaatgacagctacacaagcaacatttactcgtttacaaacaacattaacacgtacgaaggcggtacccatgaagctggcttcaaaacgggcctgactcgtgttatcaacgattacgccagaaaaaaagggcttattaaagaaaatgatccaaacctaagcggagatgacgtaagggaagggctgacagcgattatttcaatcaaacaccctgatccgcagtttgagggccaaacgaaaacaaagctgggcaactcagaagcacggacgatcaccgatacgttattttctacggcgatggaaacatttatgctggaaaatccagatgcagccaaaaaaattgtcgataaaggcttaatggcggcaagagcaagaatggctgcgaaaaaagcccgtgaactaacacgtcgtaagagtgctttggaaatttcaaacctgcccggtaagttagcggactgctcttcaaaagatccgagcatctccgagttatatatcgtagagggtgactctgccggaggatctgctaaacaaggacgcgacagacatttccaagccattttgccgcttagaggtaaaatcctaaacgttgaaaaggccagactggataaaatcctttctaacaacgaagttcgctctatgatcacagcgctcggcacaggtattggggaagacttcaaccttgagaaagcccgttaccacaaagttgtcattatgacagatgccgatgttgacggcgcgcacatcagaacactgctgttaacgttcttttacagatatatgcgccaaattatcgaaaatggctacgtgtacattgcgcagccgccgctctacaaggttcaacaggggaaacgcgttgaatatgcgtacaatgacaaggagctggaagagctgttaaaaactcttcctcaaacgcctaagcctggactgcagcgttacaaaggtcttggtgaaatgaatgccacccagctatgggagacaaccatggatcctagttccagaacacttcttcaggtaactcttgaagatgcaatggatgcggacgagacttttgaaatgcttatgggcgacaaggtagaaccgcgccgaaacttcatagaagcgaatgcgagatacgttaaaaatcttgacatctaatcataaaaagccttatttccaataagaaataaggcttttttctgaacaagatcagatgcagcaatgcttgcagtacctatatattctagcaatttaatgtgtataatcataagtttattgatataatggagaatagtgaaatcgtattgaaggtcataatggacaatctactcccacatatttcatgtgatacttcagggaggttttttaatgagtgaacaaaacacaccacaagttcgtgaaataaatatcagtcaggaaatgcgtacgtccttcttggattatgcaatgagcgttatcgtgtcccgtgctcttccagatgttcgagacggtttaaaaccggttcatagacggattttgtatgcaatgaatgatttaggcatgacaagtgacaagccttataaaaaatccgcgcgtatcgttggagaagttatcgggaaataccacccgcacggtgattcagcggtatatgaatccatggtcagaatggctcaggatttcaactaccgttatatgctcgttgacggtcacggaaacttcggttctgttgacggagactcagcggcggccatgcgttatacagaagcaagaatgtctaaaatctcaatggagattcttcgcgacatcacaaaagacacaatcgattaccaggataactatgacgggtcagaaagagaacctgtcgttatgccttcaaggttcccgaatctgctcgtgaacggtgctgccggcattgcggtaggtatggcaacaaacattcctccgcaccagctgggagaaatcattgacggtgtacttgctgtcagtgagaatccggacattacaattccagagcttatggaagtcattccagggcctgatttcccgaccgcgggtcaaatcttgggacgcagcggtatccggaaagcatacgaatcaggccgaggctctatcacgatccgggcaaaagctgagatcgaacaaacatcttcgggtaaagaaagaattatcgttacagagttaccttaccaagtaaataaggctaaattaattgagaaaattgcagatctcgtaagggacaaaaagatagagggtatcacagatctgcgtgatgagtcagatcgtacaggtatgagaattgtcattgaaatcagacgcgacgccaatgcaaatgtcatcttaaacaatctgtacaaacaaactgctctacaaacatcttttggcatcaacctgcttgcacttgttgatggccagccgaaagttttaactcttaagcaatgcctggagcattacctcgaccatcaaaaagttgtcattagacgccgtactgcttatgaattgcgtaaagcggaagcgagagctcatatcctggaaggattgagagttgcactggatcatctcgatgcagttatctcccttatccgtaattctcaaacggctgaaattgcgagaacaggtttaattgaacaattctcactgacagagaagcaagcacaagcgatccttgatatgaggctccagcgtttaacgggactggaacgtgaaaagatagaagaagaataccaatctcttgttaaattaattgcagagctaaaagacatcttggcaaatgaatataaagtgcttgagatcattcgtgaagaactcacggaaatcaaagagcgttttaacgatgaaagacgtactgagatcgtcacttctggactggagactattgaagatgaagatctcatcgagagagaaaatatcgtagttactctgacgcacaacggatacgtcaaacgtcttcctgcatcaacttaccgcagtcaaaaacgaggcggaaaaggtgtacaaggtatgggaacaaacgaagatgatttcgttgagcatttgatctctacgtcaactcatgacacgattctcttcttctcgaacaaggggaaagtgtatcgtgcaaaagggtatgaaatccctgaatacggcagaacggcaaaaggaatcccgattattaacctgctggaggtagaaaagggtgagtggatcaacgcgattattccagtcacggaattcaatgcggagctttaccttttcttcactacaaagcatggggtttcaaaacgaacatcgctatctcaattcgctaatatccgcaacaatggtctaatcgctctgggtcttcgtgaagatgatgaactgatgggtgtacgtctgactgacggcacaaaacaaatcatcattggaacgaaaaacggtttactgatccgtttccctgaaacagatgtccgggagatgggaagaactgcggcgggcgtaaaaggcatcaccctgacggatgacgacgttgttgtcggcatggagatattagaggaagaatcacacgtccttatcgtaactgaaaaagggtacggaaaacgaactccggctgaagagtacagaacccaaagccggggcggaaaaggactcaaaacagcgaaaatcaccgagaacaacggccaactagtagcagtgaaagctactaaaggtgaagaggatctaatgattattacagctagcggcgtactcatcagaatggacatcaatgatatctccatcaccggacgtgtcactcaaggtgtgcgtctcatcagaatggcagaagaagagcatgttgctacagtagctttagtagagaaaaacgaagaagatgagaatgaagaagaacaagaagaagtgtgagaaaaagcgcagctgaaatagctgcgcttttttgtgtcataaccctttacagtcataaaaattatggtataatcatttttgttgtctttttaaagacacaagcatgaccattatgactagtaaaaacttttttaaaaaagtattgacctagttaactaaaaatgttactattaagtagtcgcttcgagagaagcacacaaagttctttgaaaactaaacaagacaaaacgtacctgttaattcatttttaaaaatcgcacagcgatgtgcgtagtcagtcaaactagggcctgcacgacgcaggtcacacaggtgtcgccgcaggatgcggtgaacttaacctgtgatccatttatcggagagtttgatcctggctcaggacgaacgctggcggcgtgcctaatacatgcaagtcgagcggacagatgggagcttgctccctgatgttagcggcggacgggtgagtaacacgtgggtaacctgcctgtaagactgggataactccgggaaaccggggctaataccggatggttgtttgaaccgcatggttcaaacataaaaggtggcttcggctaccacttacagatggacccgcggcgcattagctagttggtgaggtaacggctcaccaaggcaacgatgcgtagccgacctgagagggtgatcggccacactgggactgaggcacggcccagactcctacgggaggcagcagtagggaatcttccgcaatggacgaaagtctgacggagcaacgccgcgtgagtgatgaaggttttcggatcgtaaagctctgttgttagggaagaacaagtaccgttcgaatagggcggtaccttgacggtacctaaccagaaagccacggctaactacgtgccagcagccgcggtaatacgtaggtggcaagcgttgtccggaattattgggcgtaaagggctcgcaggcggtttcttaagtctgatgtgaaagcccccggctcaaccggggagggtcattggaaactggggaacttgagtgcagaagaggagagtggaattccacgtgtagcggtgaaatgcgtagagatgtggaggaacaccagtggcgaaggcgactctctggtctgtaactgacgctgaggagcgaaagcgtggggagcgaacaggattagataccctggtagtccacgccgtaaacgatgagtgctaagtgttagggggtttccgccccttagtgctgcagctaacgcattaagcactccgcctggggagtacggtcgcaagactgaaactcaaaggaattgacgggggcccgcacaagcggtggagcatgtggtttaattcgaagcaacgcgaagaaccttaccaggtcttgacatcctctgacaatcctagagataggacgtccccttcgggggcagagtgacaggtggtgcatggttgtcgtcagctcgtgtcgtgagatgttgggttaagtcccgcaacgagcgcaacccttgatcttagttgccagcattcagttgggcactctaaggtgactgccggtgacaaaccggaggaaggtggggatgacgtcaaatcatcatgccccttatgacctgggctacacacgtgctacaatggacagaacaaagggcagcgaaaccgcgaggttaagccaatcccacaaatctgttctcagttcggatcgcagtctgcaactcgactgcgtgaagctggaatcgctagtaatcgcggatcagcatgccgcggtgaatacgttcccgggccttgtacacaccgcccgtcacaccacgagagtttgtaacacccgaagtcggtgaggtaaccttttaggagccagccgccgaaggtgggacagatgattggggtgaagtcgtaacaaggtagccgtatcggaaggtgcggctggatcacctcctttctaaggatattatacggaatataagaccttgggtcttataaacagaacgttccctgtcttgtttagttttgaaggaactttgttccttgaataagttaagatgggcctgtagctcagctggttagagcgcacgcctgataagcgtgaggtcggtggttcgagtccactcaggcccaccatcttatataacggggccttagctcagctgggagagcgcctgctttgcacgcaggaggtcagcggttcgatcccgctaggctccaccaacgtgttctttgaaaactagataacagtagacatcacattcaattagtaatacaagatatcacatagtgattctttttaacggttaagttagaaagggcgcacggtggatgccttggcactaggagccgatgaaggacgggacgaacaccgatatgcttcggggagctgtaagcaagctttgatccggagatttccgaatggggaaacccaccactcgtaatggagtggtatccatatctgaattcataggatatgagaaggcagacccggggaactgaaacatctaagtacccggaggaagagaaagcaaatgcgattccctgagtagcggcgagcgaaacgggattagcccaaaccaagaggcttgcctcttggggttgtaggacactctgtacggagttacaaaggaacgaggtagatgaagaggtctggaaaggcccgccataggaggtaacagccctgtagtcaaaacttcgttctctcctgagtggatcctgagtacggcggaacacgtgaaattccgtcggaatccgggaggaccatctcccaaggctaaatactccctagtgaccgatagtgaaccagtaccgtgagggaaaggtgaaaagcaccccggaaggggagtgaaagagatcctgaaaccgtgtgcctacaagtagtcagagcccgttaacgggtgatggcgtgccttttgtagaatgaaccggcgagttacgatcccgtgcaaggttaagcagaagatgcggagccgcagcgaaagcgagtctgaatagggcgcatgagtacgtggtcgtagacccgaaaccaggtgatctacccatgtccagggtgaagttcaggtaacactgaatggaggcccgaacccacgcacgttgaaaagtgcggggatgaggtgtgggtaggggtgaaatgccaatcgaacctggagatagctggttctctccgaaatagctttagggctagcctcaaggtaagagtcttggaggtagagcactgattggactaggggcccctaccgggttaccgaattcagtcaaactccgaatgccaatgacttatccttgggagtcagactgcgagtgataagatccgtagtcgaaagggaaacagcccagaccgccagctaaggtcccaaagtatacgttaagtggaaaaggatgtggagttgcttagacaaccaggatgttggcttagaagcagccaccatttaaagagtgcgtaatagctcactggtcgagtgactctgcgccgaaaatgtaccggggctaaacgtatcaccgaagctgcggactgttcttcgaacagtggtaggagagcgttctaagggctgtgaagccagaccggaaggactggtggagcgcttagaagtgagaatgccggtatgagtagcgaaagaggggtgagaatcccctccaccgaatgcctaaggtttcctgaggaaggctcgtccgctcagggttagtcgggacctaagccgaggccgaaaggcgtaggcgatggacaacaggttgatattcctgtaccacctcctcaccatttgagcaatggggggacgcaggaggatagggtaagcgcggtattggatatccgcgtccaagcagttaggctgggaaataggcaaatccgtttcccataaggctgagctgtgatggcgagcgaaatatagtagcgaagttcctgattccacactgccaagaaaagcctctagcgaggtgagaggtgcccgtaccgcaaaccgacacaggtaggcgaggagagaatcctaaggtgatcgagagaactctcgttaaggaactcggcaaaatgaccccgtaacttcgggagaaggggtgctctgttagggtgcaagcccgagagagccgcagtgaataggcccaggcgactgtttagcaaaaacacaggtctctgcgaagccgtaaggcgaagtataggggctgacgcctgcccggtgctggaaggttaagaggagcgcttagcgtaagcgaaggtgcgaattgaagccccagtaaacggcggccgtaactataacggtcctaaggtagcgaaattccttgtcgggtaagttccgacccgcacgaaaggcgcaacgatctgggcactgtctcaacgagagactcggtgaaattatagtacctgtgaagatgcaggttacccgcgacaggacggaaagaccccgtggagctttactgcagcctgatattgaatgttggtacagcttgtacaggataggtaggagccttggaaaccggagcgccagcttcggtggaggcatcggtgggatactaccctggctgtattgaccttctaacccgccgcccttatcgggcggggagacagtgtcaggtgggcagtttgactggggcggtcgcctcctaaaaggtaacggaggcgcccaaaggttccctcagaatggttggaaatcattcgcagagtgtaaaggcacaagggagcttgactgcgagacctacaagtcgagcagggacgaaagtcgggcttagtgatccggtggttccgcatggaagggccatcgctcaacggataaaagctaccccggggataacaggcttatctcccccaagagtccacatcgacggggaggtttggcacctcgatgtcggctcatcgcatcctggggctgtagtcggtcccaagggttgggctgttcgcccattaaagcggtacgcgagctgggttcagaacgtcgtgagacagttcggtccctatccgtcgcgggcgcaggaaatttgagaggagctgtccttagtacgagaggaccgggatggacgcaccgctggtgtaccagttgttctgccaagggcatcgctgggtagctatgtgcggacgggataagtgctgaaagcatctaagcatgaagcccccctcaagatgagatttcccattccgcaaggaagtaagatccctgaaagatgatcaggttgataggtctgaggtggaagtgtggcgacacatggagctgacagatactaatcgatcgaggacttaaccatatttttgaatgatgtcacacctgttatctagttttgagagaacactctcaatttgtttggtggcgatagcgaagaggtcacacccgttcccataccgaacacggaagttaagctcttcagcgccgatggtagtcgggggtttccccctgtgagagtaggacgccgccaagcaagcttaaacccagctcattgagctgggttttttgtttgttaaaaatgaagaagaaactgtgaagcgtatttagggaatttattttctgatactaataaaaactgctgaattaacacgtagtcatcacttatatgctgtgttaataactcataccaccattctgtttcataccttgcaatcatcccaacgttgtacaaaatcaaataatgaattgtcatttcgggaagcctcagaaattgctccctttgagaagggatataatattggttcttttccatgtcaaacaataagctggtcgatgtccatggctccttgtcttgtggtgaaatttcgaacagcagcccgtgttcatttttttttgtaaaagaccattgataatgatgggacatgtattcagcaaaccttgaatcagacattttgtaattgattactacttcctccggtataaaaatttcgttcttatccttctcaacttttgtcataaatcgttctttctgctgaaagtagaaaatatcgctaagttctggaatggccattaataattttttcatggtataccgttcatctactatatccgattgtccaaataaatgtttcataaaatgtacgcataggccattccgttgtattttcacttcatcgtcgctaaaacaataattttgtttctttcgttttcttgttgttacgccatgtgccagtactgatgtatggcttggataatgaggatcacgtgtaattaagcatgctttgataagctgtgccattccataaaataaaagaatcggtttgatttctaagggagaatatgcagcttgtttataaaacgattcggcatgctttaagaaataaataaaccgttcactgtttttaaaagagttttttttcgcatcgtcaataccgtttaagatataaaccttttctagaaatttctgggttgattcaacggagtaaaatagcgctaagtctttccactcatgatatgtcatgtatatttcttaatcctttccgttatctaaatatttcaactctttcccgcttccttgacatgctcttggctagttgataatctacatataatattttgccgaaaagagggggatttactaatgtgggaaagtaaattttcaaaagaaggcttaacgttcgacgatgtgctgcttgtaccagcaaagtctgaggtacttccgcgtgatgtggatttatctgtagaacttacaaaaacgttaaagctaaatattcctgtcatcagcgcaggtatggacactgtaacagaatcagcaatggcaattgcaatggcaagacagggcggcttgggcatcattcacaaaaatatgtccattgaacagcaggctgaacaagttgataaagtaaagcgttctgagcgcggcgttatcacaaatcccttctttttaactcctgatcaccaagtatttgatgcggagcatttgatggggaaatacagaatttccggtgttccgattgtaaataacgaagaagaccagaagcttgttggaattattacaaaccgtgaccttcgttttatttctgactactcaatgaaaatcagcgacgtcatgacgaaagaagagctagttactgcatctgtaggaactactctggatgaagctgaaaagattttgcagaaacataaaattgaaaagcttcctctcgtagatgaccagaataaattaaaaggtcttatcacaattaaagacattgaaaaagtcattgagttcccgaactcatctaaagacattcacggccgcctgatcgttggcgcggcagttggtgtaactggcgatacaatgactcgcgtcaaaaagcttgttgaagccaatgttgatgtgattgttatcgatacagctcacggacactctcaaggcgttttaaacacagtcacaaaaattcgtgaaacgtatcccgaattaaacattattgctggaaacgtggcaacagctgaagcgacaagagcgcttatcgaagctggagcagacgttgtcaaagttggaataggacctggttcaatttgtactacacgtgttgtagccggcgtcggtgttccgcaaattacagcaatttatgattgtgcgactgaagcaagaaaacacggcaaaacaatcatagccgatggtgggattaaattctctggcgatatcactaaagcgttggcagccggcggacatgctgttatgctcggaagcttgcttgcaggcacatctgaaagccctggtgaaactgaaatctatcaaggcagaagatttaaggtataccgcggcatgggatcagttgctgcaatggaaaaaggaagtaaagaccgttacttccaagaagaaaacaaaaaatttgttcctgaaggaattgaaggacgcacaccttacaaagggccagttgaagaaaccgtttatcagctagtcggaggccttcgttctggtatggggtattgcgggtccaaagatctgcgtgcgctaagagaagaagctcagttcattcgcatgactggcgcaggacttcgcgaaagccatccgcatgacgtacagattacaaaagaatcacctaactatacaatttcataataaattgttacaaattaaaaacatttgacagggtctctgactctgtctattttttttatactgattatgataaaatttatactgttgtgcattgaaaatgtccttaacggcttaattatagatgaagaaaatgaaatacggaggtcgtacgattgaacatcaagaaatgtaaacagctactgatgtcattggttgtgttaactctagctgtcacgtgtctggctccaatgtcaaaagcaaaagcagccagcgatccaattgatatcaatgcatctgctgctattatgatcgaagcttcttcaggtaaaattctttacagtaaaaatgcagataagagactgccaattgcgagtatgacaaaaatgatgacagagtatctgttattagaagcaattgatcaaggtaaagtgaaatgggaccaaacctatacgcctgatgactatgtgtatgaaatttcccaagataacagcttatcaaacgttcctcttcggaaagacgggaaatacacagtaaaagaattatatcaagctacagcaatttattctgcaaatgctgctgctattgcaattgcagaaatcgttgccggttctgaaactaagtttgttgaaaaaatgaatgcaaaagcaaaagaactaggcttaacagattacaaatttgttaacgcaacaggtcttgaaaacaaagatcttcacgggcatcagcctgaggggacaagcgtaaatgaagaaagtgaagtttctgcaaaggatatggcaattcttgcggatcacttgattactgactaccctgagatactggagacttccagtatcgccaaaacgaaattcagagaaggcaccgatgatgaaatggacatgccgaactggaattttatgctgaaggggcttgtcagcgagtataaaaaagcgactgtagacggactgaaaacaggttctactgactctgcgggttcatgctttacaggaacagctgaacgcaacggtatgcgtgtcatcactgttgttttaaacgcgaagggcaaccttcatacaggccgtttcgatgaaacgaaaaaaatgtttgattatgctttcgacaatttctccatgaaagaaatttatgctgaaggcgatcaagtaaaaggccataaaacaatttcagttgataagggtaaagagaaagaagtaggcattgtgacaaacaaggcgttctctcttcctgtcaaaaatggtgaagaaaagaattacaaagcgaaggtcacactgaataaagacaacttaactgctcctgtgaaaaaaggaaccaaggttgggaagctgactgcggaatacacaggtgatgaaaaggattacggattccttaacagcgatctggctggcgtagaccttgttacaaaagaaaatgtagaaaaagcaaactggtttgttttgacaatgcgcagtatcggcggattttttgccggaatttggggaagcattgttgatacggtaaccggctggttttaatcaattgaaagagctctgatggatgttagggctctttcgcgtaatatactgaaaaaacccaatttttaataaaaaatgattttcaaagcgctaaaaaccgaataaaatagtatatatccatatgaattattggatttctaggatacaataaggattagaaatcatataactataccttgattagggggaccaagaaatggctcaaacaggtactgaacgtgtaaaacgcggaatggcagaaatgcaaaaaggcggcgtcatcatggacgtcatcaatgcggaacaagcgaaaatcgctgaagaagctggagctgtcgctgtaatggcgctagaacgtgtgccagcagatattcgcgcggctggaggagttgcccgtatggctgaccctacaatcgtggaagaagtaatgaatgcagtatctatcccggtaatggcaaaagcgcgtatcggacatattgttgaagcgcgtgtgcttgaagctatgggtgttgactatattgatgaaagtgaagttctgacgccggctgacgaagaatttcatttaaataaaaatgaatacacagttccttttgtctgtggctgccgtgatcttggtgaagcaacacgccgtattgcggaaggtgcttctatgcttcgcacaaaaggtgagcctggaacaggtaatattgttgaggctgttcgccatatgcgtaaagttaacgctcaagtgcgcaaagtagttgcgatgagtgaggatgaactaatgacagaagcgaaaaatctaggtgctccttacgagcttcttcttcaaattaaaaaagacggcaagcttcctgtcgttaactttgccgctggcggtgtagcaactccagctgatgctgctctcatgatgcagctcggtgctgacggagtatttgttggttctggtattttcaaatcagacaaccctgctaaatttgcgaaagcaattgtggaagcaacaactcactttactgattacaaattaatcgctgagttgtcaaaagagcttggtactgcaatgaaagggattgaaatctcaaacttacttccagaacagcgtatgcaagaacgcggctggtaagaacataggagcgctgctgacatgttaacaataggtgtactaggacttcaaggagcagttagagagcacatccatgcgattgaagcatgcggcgcggctggtcttgtcgtaaaacgtccggagcagctgaacgaagttgacgggttgattttgccgggcggtgagagcacgacgatgcgccgtttgatcgatacgtatcaattcatggagccgcttcgtgaattcgctgctcagggcaaaccgatgtttggaacatgtgccggattaattatattagcaaaagaaattgccggttcagataatcctcatttaggtcttctgaatgtggttgtagaacgtaattcatttggccggcaggttgacagctttgaagctgatttaacaattaaaggcttggacgagccttttactggggtattcatccgtgctccgcatattttagaagctggtgaaaatgttgaagttctatcggagcataatggtcgtattgtagccgcgaaacaggggcaattccttggctgctcattccatccggagctgacagaagatcaccgagtgacgcagctgtttgttgaaatggttgaggaatataagcaaaaggcacttgtataaaacagttgaaagctgtggaaacttatagtacattataagcacaaataaagatcgaaaagcgttgataggaactagtagggagcctctctttctaagagagccgatggttggtgcgaatcggtgaaagatgctgtctgaatccatccttgagcgaaatgctgaagcgagtaggcatttacgggataaccgttatgtttgaaagtggaaaacgagtctttgatttgttttcaatcagggtggcaacgcgagagctctcgtccctttatggggatgagggctctttttattttcgataaatcaataaaaaaaggagtgtttcgcatgcttgatacgaaaatgctgagagcaaattttcaagaaattaaagcaaagcttgtacacaaaggcgaagacttaactgattttgataagtttgaggcgctggatgatagacgaagagagcttatcggcaaggttgaagagttaaaaggaaaacgaaatgaagtttctcagcaggttgctgtgctgaagcgtgagaaaaaagacgcggatcacattattaaagcaatgcgtgaagtcggcgaggaaattaaaaagctcgatgaagaattacggacagtggaagctgagcttgatacaatcctgctctcaatcccgaatattccgcatgagtctgtacctgtcggtgaaacagaagacgacaacgtagaagtgcgtaaatggggtgaaaagccttcatttgcttatgagccgaagccgcactgggatattgcggatgagctgggtattctggattttgaacgtgctgccaaagtaacaggaagccgtttcgtgttctataaaggcttaggtgctcgtctggagcgtgcgctttataactttatgcttgatctgcatgtggatgagtataactacactgaagtgatcccgccatatatggtaaaccgcgcaagcatgacgggaacggggcagcttcctaaatttgaagaggatgcatttaaaatcagagaagaagattatttcttaattccaacggcggaagtgccgattacaaacatgcatcgcgatgaaatcctttcaggtgacagcctgccgatcaactatgcggcattcagtgcttgcttccgttctgaagctggttcagcaggacgtgacacacgcggattaattcgtcagcaccaatttaataaagttgagcttgtaaagtttgtgaagcctgaagattcttatgaagaattagagaaacttacaaaccaagcagaacgggttcttcagctgcttgagcttccataccgtgtcatgagcatgtgtacgggtgacttaggctttacggctgcgaaaaaatacgatatcgaagtttggattccaagccaagacacatatcgagaaatctcttcttgcagcaacttcgaagcgttccaggcgagacgtgcgaatattcgtttcagacgtgaagctaaaggcaagcctgagcatgtacacacactgaacggttcaggactggcggttggaagaacagttgccgctatcttagaaaattatcagcaggaagacggaagcgttgtgattccgaaagtgctccgtccttatatggggaatagagaagtaatgaaaccgtaaattatggaaaggcgtgcctgacaaggtgcgcctttttgcttatgtaaacacggcattttcataaaaacaaaaaaagtttttaaaaatgcttgaccacacgagaacatacgtgatatagtaagtcttgtcgatacggaggaatacccaagtccggctgaagggatcggtcttgaaaaccgacaggggtgtcaaagcccgcgggggttcgaatccctcttcctccgccatattgattttaattctaatgaaacacaagcatatattggagattgttttgtccgttgcattcggtgcggcggattttttattttaaagaaaaagtgaatctcgactgagattcactttttttgattatcatgaataactgaagcaatttgatctacaatattttcaatcgagttttcgtcgttcagaagatcataatcttcaatgcgaagttttaaaacagggcaggcattaaaaccgcttatccagttctcgtagcgtgtatgcatttcttcccaataagacctgcttgtctgaagctccatctcacggccgcgttgttcaatccggtttaaaatgttctccagatctccttctaaatagatcagcacatctgggtgtgggaaatacggtgtcattaccattgcttcgaaaaggcttgtgtaagtcttataatcaacctttgacattgtccctttatcagcatgcatttttgcgaaaattcctgtatcttcataaatcgaacgatcctgtacaaaacctccgccggcttcaaaaattgttttctgttctttgaagcgttcagctaagaagtaaatttgaaggtgaaagctccaacgttcaaaatcatgatagaacttttccaagtatggattatgatcgacttcctccaaagatgttttaaatccaagccgtttagctaaagtttttgttaaagtcgattttccgacacctactgttcctgctactgtaataattgaattcttagggatatgatgttccttcatacgataagctcctttacatgggcggcaatgcgttcaaagtcgctcttattcaaaacgaaatcctttgaatcaccatctacggttaacactgtaagttcagggtctgcttcctgcagctgcttgatggcgacttcataatctgaaatcagctgctccaaatagctagtttcaatttttttctcaaaggggcgcccgcgtttttcaatgcggtgtagcaatgtaggcagactggcctttatgtaaatgatgaaattcggctttggcagatcatccgttagcaggtgatatatctttttgtatttttccagctgatgtggagacaaggtgcgttccgcaaaaatcacatttttataaatatgataatcagctattacaggctgtcccttttttaaaaagtgatcactggtgtcttcaagctgtttgtatctgtgacaaagaaaaaacatctcgagctggaagctccattcctctatattgtcataaaacttatcaaggtacgggttatcctctacaatctcattgatcatagggaatccgaattcttgtgagagcatcgttgcgagagttgtttttcctgccccgataggaccttctattgcaataaaaggggctgtattcatcggaatcctccttatatctgaaaaacgtgcgtcagttaccgaccttcatattgtatcacaacccttgggtgcccccatgaaaaaagacgtttccaaattatcgaaacgtctttttgacaacattaaattgatcagacagcagcagccagttttgtggaaaggaaagacccagcttccaatagctgatgcctcttaaattcagctctttaatcagattaaattttgcttgaatcgagcgggcatcctcgaaccatacctcgtgccttctgttttctgcatcagtatagcggaagaaaggagcttgagcggtttggtcatactgaatggaagcattgttctgatcagctatgacaatggcttgctgagggcttactgctcttgctggagttccccctgctgtatatggcagcgtccagtcatatccatataaattctggcccatgacaattttgttcgcaggcatttcagtcaaagcatattctatgacatcacggacaggtccaattggagaaaccgcttgaggcggcccgccgctatagccccattcatatgtcatgagaacaacaaagtcgacaatttggccatgcgccctgtaatcatgagcttcataccatctgccctgctgtgttgcacttgttttaggagcaagtgccgtagaaatttctaagccctctcgatgaaaaagatcccttgcttcgcggagaaattgattataggcctctctatcctggggccgcaaatattcaaagtcgaaatgaatgtcacggaagccatatctcttggcattctccactatttcatttagaagccttctttttacagtttcgtcgttcaaaaggatccggccaagttcatcactaaatgcctggttttctaggttcgttataatcatcatcaatgttgtattttgactttctgtaatgctccttaaattcgttaaaggcggtgcgactaaggttccgttccgctgtgcctggaagctgaatgcgccaaggtacgttaagtagggcgacgcttctctggccgcctgctggagattttcgctgacttgatttcctcggggctccaaataagcatttgattcgatgtctcgtttaggggctggtgggatgtatatacggaaaccaatctgaagcacggtatttaactggatgcggttaacccttgcgagctcggctgctgttgtattgaactgccgggcgatggatgtcagggtatcacctcgcttcacatcatagaactggccggctattggaatgacaatggtttgtccgacaacaaggctgtcgggattcggtatttcattcgtttcagtgatctcatttgcggttgttctgtattgtgaagcgatagcagaaagagtgtcgccttgttttaccacataaatttgaatgaaaaacgcctcctttcatatcgctatcaatgtatgaaagaaaagcgctgatcatgtttatttttctgtaatttgttcttccgtcgtaatttctgcgaaaagaacattctccatcatagttaaggcgaattcgttatcttcgtcactgtttgacgcgatacagtccttaggaatcgtgatgctgtattccctcatataagcgtcattagcggtaaacagcacacatatattgccggctatacctgttaagataatatgtctcacctgcaactcagtaagaagggtgtgaagtgcagtttcgtagaaagcggaatgttttggtttgattaaaaaataatcagcatcttccggggctatcttagtgatgatatccttgcttctttcatttgtgcattcttgctgaatgtttttaatgtcagcttgccaaagtccataatgatcattgatgtaaataatcggccattcattttgtctcgcgtgctcctttaatgataaaatatgaggaacgattttttctgtttttttagcgagggtttctcccatatcgaattcaaaattattgatcatgtctacaatgagaagggctgtatctgctttggacaatcgacagtctcctttccgtttcagttatagttaatatgtagcctttttaggcaatgaaaaaactttgaaaagagagcttatccttatgacacaagatgaactttatatgaaagaagcaattaaagaagcgaaaaaggctgaagagaaaggtgaagtgccaataggtgcggtgcttgtcgttaatgatgaaattatagcgcgtgcacataatttaagagagactgagcaacgatctattgcccatgcagaaatgcttgtgattgatgaagcgtgtaaggcactgggaacatggcggctggaaggtgcgactctttatgtgacgcttgagccttgtccaatgtgtgctggtgcagtcgtactttctcgagtggaaaaagtggtttttggcgcatttgatccgaaaggcggctgttcaggcacgctaatgaaccttctccaggaggaacgctttaatcatcaggctgaagtggtgagcggtgtacttgaggaagaatgcggcggaatgctcagtgcgtttttcagagaactaagaaaaaagaagaaagctgccaggaaaaacttgtctgaatagtacggttgcaatttttaggggaaacagatatacttaagtgtgcatcgtaatagatgcaacataaaatttgatatttattttgccgtgctaagcggggaggtagcggtgccctgtacctgcaatccgctctagcagggccgaatcccttctcgaggttcgtttactttaaggcctgccttaagtaagtggtgttgacgtttgggtcctgcgcaatgggaattcatgaaccatgtcaggtccggaaggaagcagcattaagtgaaacctctcatgtgccgcagggttgcctgggccgagctaactgcttaagtaacgcttagggtagcgaatcgacagaaggtgcacggtaaatcaatcatcaaattttcagactcacctaatattaggtgagttttttgttatgtaaaaagagcttttggaatcgaaacaaggttcatgtataatgggaatgatgaataacggaggagggcaaacccgtgagttaccaagctttatatcgagtattcaggcctcagcgctttgaagatgtggtcggacaagaacacattacaaaaacgctgcaaaatgcccttttgcaaaaaaagttttctcacgcctatctgttttccgggccaagaggaaccggaaaaaccagtgcagccaaaatatttgctaaggctgtcaactgtgaacatgctcctgttgatgagccatgcaacgaatgtgcggcctgtaaagggataacaaacgggtcaatatccgatgtcatagaaattgacgccgcttctaataacggtgttgatgagattcgtgacattcgcgataaagtgaagtttgccccgtcggccgtcacatataaggtatatatcatagatgaggtgcatatgctttctatcggcgcttttaatgcattactaaaaacattagaagagccgcctgagcattgtattttcatattagcaacaactgaaccacacaaaattcctttaaccattatctctagatgtcagcgttttgactttaaacgaattacctcccaggcgattgtaggccgcatgaataaaattgttgatgctgaacagctgcaagtggaggaaggatcgctggatatcatcgcgagtgctgcagacggagggatgagggatgccctgagccttcttgatcaggccatatcattcagcggcgatatcctgaaagtcgaagatgcgcttttaattacgggtgctgtttctcaattatatatcgggaagcttgcacaatccctgcatgataaaaacgtttctgacgcactggaaacattaaatgaattgcttcagcaaggaaaagatccagctaagctgatagaagatatgattttctatttcagggacatgctgctgtacaaaacagcccctggcttagagggagttcttgagaaagtaaaagttgatgaaacgttccgggaactaagtgaacaaattccggctcaggccctatatgaaatgattgatattctgaacaagagccatcaggaaatgaaatggacaaatcatccgcgtatctttttcgaagtggccgttgtgaagatttgccaaacctcacatcaatctgctgctgatctcccggaagtggatatgctgatgaaaaaaatccagcagctcgaacaggaagtagagcggctcaaaacaacgggcataaaagcagctgcggaaagcccgaaaaaagaagcgccgcgtgtgccaaagggcgggaaatccaattacaaagcgccagtaggcagaattcatgagattttgaaggaagccacaagaccggatcttgatctgctcagaaacagttggggcaagcttcttgctcatctcaaacagcaaaacaaagtatcacatgccgctttactgaatgacagtgaacctgtggctgccggatcggcggcatttgttctgaaattcaaatatgaaattcattgtaaaatggtcgctgaggataacaacggagtccggactaatcttgagcagattttagaatcgatgctcggaaaaagaatggatttgattggcgttccagaagcacaatggggtaaaataagagaagaatttttagaagatcatcagcaggaaaatgaaggatcaaatgaaccggctgaagaagacccgcttattgccgaagcgaaaaagcttgttggagcggatttaattgaaataaaagactaacaaaatgaaagagagtgaatgctatgcgtggcggaatgggtaatatgcaaaaaatgatgaaacaaatgcaaaaaatgcaaaaggacatggcgaaggctcaagaagagcttgcagaaaaggttgttgaaggaactgcaggcggcggtatggtaacagtaaaagcaaacggccaaaaagaaatcctggatgttatcatcaaagaagaagtcgttgatcctgaagatattgatatgcttcaagatttagtgcttgctgcaacgaatgaagctttgaaaaaagttgacgaaatcacaaacgaaacaatgggtcaatttacaaagggaatgaacatgccaggtttattctagggggataaaagaacatgcaatatcctgaaccaatatcaaagctgattgacagctttatgaaattgccagggatcggaccgaaaacagcggttcgtctggctttttttgttctaggtatgaaagaagatgtagtattagattttgcgaaagcattagtaaatgcgaaacgcaacctgacatattgttcagtttgcgggcatattacagatcaggacccttgctatatatgtgaagatacgcgcagggataagtctgttatctgtgttgtgcaagaccctaaggatgttatcgctatggagaaaatgaaggaatacaacggacagtatcacgttcttcacggcgctatttctccaatggacggcatcggaccggaggatattaaaataccagaattgttaaaacgattacaggatgatcaagtgacagaagtgatcctcgcgacaaaccctaatatagaaggggaagcaacggcgatgtatatatcaaggctcctcaagccgtctggtattaagctctcccgtattgcccacggactgcccgtcggcggtgacttggaatatgctgacgaggtcactctttctaaagcacttgaaggaagacgtgaattgtaaggaggaaaaagcgatccatgggttttcttcgcaagaaaacattaagaagagagtttgatgaaaaactaaccgagcagctttttaagcaaaaggaagagtggaacaggcaaaaaaagctggtcgaaaaaagcttagaaccgtctgctgaagtgttatacgaactgaaagtagctgaagcgaagtattttttttacttaagggaagcgaagcagcgaaatttaaaaatcagccggtggaagtaagtggtctaaactcctggatcttctcataagcttgtactagaacaagcgaaggagatgagaagattcatggagcctatttttattattgggattattttaggactggttattcttctttttttatcaggttcaactgcgaagcctttaaagtggatgggcatcacagctgttaaatttgtggcaggtgctttgctgctggtttgtgtaaatatgtttggcggcagtcttggcattcatgtgccgattaatctggttacaacagctatcagcggaattttagggatacccggaatagctgcgttagtcgttattaagcaatttatcatttaattgatattatgtattgacttagacaactgaaggtgttattctaatatacgtcgctgatgacgaacagcttttttgaaaaggaaatgctaaaaagttgttgacagtagcggcggtaaatgttatgataataaagtcgcttaaacgagcggtaaacaaagttctttgaaaactaaacaagacaaaatgtacctgttaattcatttttataaatcgcacagcgatgtgcgtagtcagtcaaactactttatcggagagtttgatcctggctcaggacgaacgctggcggcgtgcctaatacatgcaagtcgagcggacagatgggagcttgctccctgatgttagcggcggacgggtgagtaacacgtgggtaacctgcctgtaagactgggataactccgggaaaccggggctaataccggatggttgtttgaaccgcatggttcaaacataaaaggtggcttcggctaccacttacagatggacccgcggcgcattagctagttggtgaggtaacggctcaccaaggcaacgatgcgtagccgacctgagagggtgatcggccacactgggactgagacacggcccagactcctacgggaggcagcagtagggaatcttccgcaatggacgaaagtctgacggagcaacgccgcgtgagtgatgaaggttttcggatcgtaaagctctgttgttagggaagaacaagtaccgttcgaatagggcggtaccttgacggtacctaaccagaaagccacggctaactacgtgccagcagccgcggtaatacgtaggtggcaagcgttgtccggaattattgggcgtaaagggctcgcaggcggtttcttaagtctgatgtgaaagcccccggctcaaccggggagggtcattggaaactggggaacttgagtgcagaagaggagagtggaattccacgtgtagcggtgaaatgcgtagagatgtggaggaacaccagtggcgaaggcgactctctggtctgtaactgacgctgaggagcgaaagcgtggggagcgaacaggattagataccctggtagtccacgccgtaaacgatgagtgctaagtgttagggggtttccgccccttagtgctgcagctaacgcattaagcactccgcctggggagtacggtcgcaagactgaaactcaaaggaattgacgggggcccgcacaagcggtggagcatgtggtttaattcgaagcaacgcgaagaaccttaccaggtcttgacatcctctgacaatcctagagataggacgtccccttcgggggcagagtgacaggtggtgcatggttgtcgtcagctcgtgtcgtgagatgttgggttaagtcccgcaacgagcgcaacccttgatcttagttgccagcattcagttgggcactctaaggtgactgccggtgacaaaccggaggaaggtggggatgacgtcaaatcatcatgccccttatgacctgggctacacacgtgctacaatggacagaacaaagggcagcgaaaccgcgaggttaagccaatcccacaaatctgttctcagttcggatcgcagtctgcaactcgactgcgtgaagctggaatcgctagtaatcgcggatcagcatgccgcggtgaatacgttcccgggccttgtacacaccgcccgtcacaccacgagagtttgtaacacccgaagtcggtgaggtaaccttttaggagccagccgccgaaggtgggacagatgattggggtgaagtcgtaacaaggtagccgtatcggaaggtgcggctggatcacctcctttctaaggatattatacggaatataagaccttggctcttataaacagaacgttccctgtcttgtttagttttgaaggaactttgttccttgaataagttaagatgggcctgtagctcagctggttagagcgcacgcctgataagcgtgaggtcggtggttcgagtccactcaggcccaccatcttatataacggggccttagctcagctgggagagcgcctgctttgcacgcaggaggtcagcggttcgatcccgctaggctccaccaacgtgttctttgaaaactagataacagtagacatcacattcaattagtaacacaagatatcacatagtgattctttttaacggttaagttagaaagggcgcacggtggatgccttggcactaggagccgatgaaggacgggacgaacaccgatatgcttcggggagctgtaagcaagctttgatccggagatttccgaatggggaaacccaccactcgtaatggagtggtatccatatctgaattcataggatatgagaaggcagacccggggaactgaaacatctaagtacccggaggaagagaaagcaaatgcgattccctgagtagcggcgagcgaaacgggattagcccaaaccaagaggcttgcctcttggggttgtaggacactctatacggagttacaaaagaacgaggtagatgaagaggtctggaaaggcccgccataggaggtaacagccctgtagtcaaaacttcgttctctcctgagtggatcctgagtacggcggaacacgtgaaattccgtcggaatccgggaggaccatctcccaaggctaaatactccctagtgaccgatagtgaaccagtaccgtgagggaaaggtgaaaagcaccccggaaggggagtgaaagagatcctgaaaccgtgtgcctacaagtagtcagagcccgttaacgggtgatggcgtgccttttgtagaatgaaccggcgagttacgatcccgtgcaaggttaagcagaagatgcggagccgcagcgaaagcgagtctgaatagggcgcatgagtacgtggtcgtagacccgaaaccaggtgatctacccatgtccagggtgaagttcaggtaacactgaatggaggcccgaacccacgcacgttgaaaagtgcggggatgaggtgtgggtaggggtgaaatgccaatcgaacctggagatagctggttctctccgaaatagctttagggctagcctcaaggtaagagtcttggaggtagagcactgattggactaggggcccctaccgggttaccgaattcagtcaaactccgaatgccaatgacttatccttgggagtcagactgcgagtgataagatccgtagtcgaaagggaaacagcccagaccgccagctaaggtcccaaagtatacgttaagtggaaaaggatgtggagttgcttagacaaccaggatgttggcttagaagcagccaccatttaaagagtgcgtaatagctcactggtcgagtgactctgcgccgaaaatgtaccggggctaaacgtatcaccgaagctgcggactgttcttcgaacagtggtaggagagcgttctaagggctgtgaagccagaccggaaggactggtggagcgcttagaagtgagaatgccggtatgagtagcgaaagaggggtgagaatcccctccaccgaatgcctaaggtttcctgaggaaggctcgtccgctcagggttagtcgggacctaagccgaggccgaaaggcgtaggcgatggacaacaggttgatattcctgtaccacctcctcaccatttgagcaatggggggacgcaggaggatagggtaagcgcggtattggatatccgcgtccaagcagttaggctgggaaataggcaaatccgtttcccataaggctgagctgtgatggcgagcgaaatatagtagcgaagttcctgattccacactgccaagaaaagcctctagcgaggtgagaggtgcccgtaccgcaaaccgacacaggtaggcgaggagagaatcctaaggtgatcgagagaactctcgttaaggaactcggcaaaatgaccccgtaacttcgggagaaggggtgctctgttagggtgcaagcccgagagagccgcagtgaataggcccaggcgactgtttagcaaaaacacaggtctctgcgaagccgtaaggcgaagtataggggctgacgcctgcccggtgctggaaggttaagaggagcgcttagcgtaagcgaaggtgcgaattgaagccccagtaaacggcggccgtaactataacggtcctaaggtagcgaaattccttgtcgggtaagttccgacccgcacgaaaggcgcaacgatctgggcactgtctcaacgagagactcggtgaaattatagtacctgtgaagatgcaggttacccgcgacaggacggaaagaccccgtggagctttactgcagcctgatattgaatgttggtacagcttgtacaggataggtaggagccttggaaaccggagcgccagcttcggtggaggcatcggtgggatactaccctggctgtattgaccttctaacccgccgcccttatcgggcggggagacagtgtcaggtgggcagtttgactggggcggtcgcctcctaaaaggtaacggaggcgcccaaaggttccctcagaatggttggaaatcattcgcagagtgtaaaggcacaagggagcttgactgcgagacctacaagtcgagcagggacgaaagtcgggcttagtgatccggtggttccgcatggaagggccatcgctcaacggataaaagctaccccggggataacaggcttatctcccccaagagtccacatcgacggggaggtttggcacctcgatgtcggctcatcgcatcctggggctgtagtcggtcccaagggttgggctgttcgcccattaaagcggtacgcgagctgggttcagaacgtcgtgagacagttcggtccctatccgtcgcgggcgcaggaaatttgagaggagctgtccttagtacgagaggaccgggatggacgcaccgctggtgtaccagttgttctgccaagggcatcgctgggtagctatgtgcggacgggataagtgctgaaagcatctaagcatgaagcccccctcaagatgagatttcccattccgcaaggaagtaagatccctgaaagatgatcaggttgataggtctgaggtggaagtgtggcgacacatggagctgacagatactaatcgatcgaggacttaaccacattttgaatgatgtcacacctgttatctagttttgagagaacactctcaatttgtttggtggcgatagcgaagaggtcacacccgttcccataccgaacacggaagttaagctcttcagcgccgatggtagtcgggggtttccccctgtgagagtaggacgccgccaagcaagtttaaacccagctcattgagctgggttttttgtttacttaagatcgagaaaatcaaacaaatacaaacaccgagggcttatatagcccatatactgatttaaagtttcaaaaaggtctaaatagtgtatacaatatccgttttaaggggaggctaactgtacggaggtggagaagatggacgaaacagttaaacttaatcatacatgtgtgatttgtgatcaagagaagaatagaggcattcatctttatacgaaattcatatgcttagattgtgagagaaaagtaatttctacatcaacttctgatcctgactatgcgttttacgtaaaaaaactaaagagcattcatacaccgccattatattcatagacctgaaaaggtctttttttgtactcttaataataaaaagaagatgaaacttgtttaaggattgaacgtagtagataataatattaaaactgagtatagacacaggagtcgattatctcatgcagagattttttcactttttgatgtggagtttaactagcagtgcgacttttgttttcattggaatattgagcttttttggtttaaaccagtcgctttttttatctattgtttatgggcttgcttctggagcagccgtatatatagctggcatctggaatgcaagacggttatttcttaaaaagcatgaattgacaggaagagagtatgcttacattaagaaaaacttagaggaagcaaggcagaaaatgatccgtcttaggaaagccttgtttcaggctaaaagcattcaaatgtttaagcaaaatgcagaaatgctaaggattgtgagaaggatttatctcctcaccaaaaaagagccaaagcggttttatcaggcagaacgatttttttatcaaactctcgattcggttgttgaattaacagagaagtatgcttttctatcatctcaccccaaaaaaagcaaagaactttcgatgtcgttaagtgagacacgcatcactcttactaaattgaccaagcgtttagaggaagatttaactcaagtaatgggtgatgaaattgacgagttgcactttgaattagacgcagcaaaacattcattaaagaaataagggaagagggtaagagcgatgaaccgagaccaaagcgaccttcatatagatgaattattggcagatccttttggtggtaacatagagataccaggttcggaggctgtaaaagcagagaaagagcaagtacggcttgttgatgttcttcctgaggaaaacaagaaaaaagcaattcagcttgctggacagattgatcataaaaatatgcaaagcattgtcttatacggttcacaagctcaatctaaactgctgaacttttctcatgatatgattaatcatgttcaaaagaaggatgtcggggaaattggcgaaatacttggagagctgatgaaaaagctggagcaagtaaatcctgatgatctccaatctaagaaaaagggttttttggcacgcatgtttggaagagtatcaagttctcttcaagaggtgctgtctaaataccaaaagaccagtgtgcagatagacaaaatcagcttgaagctggagcactctaaaaatgctttaattagtgacaacaagctgttagagcagttatatgaaaaaaataaagaatattttgccgcgctgaatgtttatattgctgcaggagaactgaagctggaggaattaaaaacaaaaacgattcctgaactgaagcaacaggctgaatcgagtgatcataaccaaatggccgttcaagaggtgaatgatttaattcaatttgctgaccggttagataaaagggtgcatgatttgctgctgagcaggcaaattacaatccaaagtgcaccgcaaatcaggctgattcaaaacacaaaccaagcgttagcagaaaagattcagtcatccattgtgacagcgattccgctatggaaaaatcaagttgccattgcactgacgcttttaaggcagcgcaatgcagtggatgcacaacagaaagtatctgatacaaccaatgagcttttgctgaaaaatgcggagcttttaaaaaccaatacaattgaaactgtacgagcaaatgaacgaggccttgttgatatagataccttaaaaaaggtgcaggaaagcttaataagcacgcttgaagaaacactgactatacaagaagaaggacgaatcaaacgccgtcaggcagaagaagagctgatgatgatggaaggcgacctaaagcaaaagctgcttacaataaaggaaagatagttaccagtaagtctggctttaagttctgtcagaggcacgatataataaggtgtaagaagacacattcaaaggattgttttcatgaacacacctttatataaagcattaattcaacatgcgagaagaaattctcattcatttcatgttccgggacatcacaatggagatgtcttttttgatgacgctaagtcaatattcaatccgcttctcaccattgatgtaactgaactggcaggactggatgatctccatcatccttctggggtgattaaggaagctcaggagcttgccagtcaattatatggatcggcggaaagtttttttctggtaaatggtacgactgtcggaaacttagcgatgattttatctgtttgtgaacctggtgatacaattctggttcaaagaaactgtcataaatctgtatttcatgctgttgatttgtccggtgctgagccggtttatcttgcacctgacgttgattcagcgatgcatgtgcctacgcatgttccgcttggaacaattaaagaggccctggaagcatatccagatgcgaaaggcttggtactgaccaatccgacatattacggacatagtgctgatttgactgagatcattactgaagcccatcattacgggattcctgttttggtcgatgaagcgcatggcgcacattttattttaggtgagccttttccggtctcagctttaaaaatgggggcagatattgttgttcagtcggcccacaaaacgttgcctgccatgacgatgggttcttatttgcatctcaacagcagctgcaggattaacagggatcgggtggcagagtatttaaaccgattacaaagcagcagcccgtcttatccgattatggcttcgttagatattgcccgcgcttatgtacagcatattatagaagaacaaaagctttctgacattctgcagcggatagaaacacttaaacaaacgtttgattcacttacaaatgcagaagctgttaaccctgctaatccactgatcatcacggatccgctaaagctcacaattcgttcaaaacgcggacattctggctatacgctgcaaagcatattagagcgtgccaacatattcactgagcttgctgatgaaaatcaagtactgctcgttctcccattgggaggaaaacggagaataaatgctgaaaccattagaagcattgatgaagagattgagaaaacgcctccggatcaggcgtttgtttctgcagaatggggagtgcagcctgttactgtcttgccttatccaaaaaaggtcttacattcgtttaagaaagaatatgtggactttgaggaagcagctggccggctgaatgcagaagatatcatcccttatcctccgggtatcccgatgattatggcgggagaaagaataacaaaagaaagtgtgcaaaagctcagccgcttgatcagcatgaaaacgcatgttcaagggaatatgaaaatcaaagagaaacaactacttgtttatatagaagaggagaaatcatgagcggtttatttattacattcgaaggtcctgaaggtgcagggaaaacgactgttctgcaggagatcaaaaacatactgacagcagaaggccttcaggttatggcaactcgagagccaggcggaatagatattgcagaacaaattcgagaggttattctgaatgagaacaatatattaatggacccaaaaacagaagctctcttatatgcggctgcaagacgccagcatttagttgaaaaagtaaaacctgctttagaacagggggttatcgttctttgcgacagattcatagacagttctcttgcgtatcaaggatatgcaagagggcttggaattgatgaggttctgtccattaatgaatttgccattggagatatgatgccccatgtaacggtttatttttcaattgatccggaagaaggactgaagcgtatttacgcaaacggctcacgggagaaaaacaggctcgatttagaaaaactggactttcatacaaaagtacaagaaggttatcaagagctgatgaagcgatttccggaaagatttcattcagttgatgccgggcaatccaaagacctcgtcgttcaggatgttctaaaggtgatcgatgaagcgttgaaaaaaattcaattgtgacctgtttcccaatagttgatataataatgtaaacgagatcacgttgtttccaatctaaaggaggccttcacagatgaaattgatagtggcagttgtacaagatcaggacagcaacagacttttgaaaaccttaacggatcacaacttcagagtcacaaagcttgcgacgacaggaggatttcttaaatcaggcaatacaacgtttatgatcggtgtcgaggatatacgcgtcaataaagcgttgagtctcattaaagaaaacgggcagaaacgtgatcagatgattgcccctgtatctccaatgggtggaaatgctgattcctatgtcccttatccagtcgaagttgaagttggcggagcgacagtatttgtccttccagtcgatgaatttcatcaattttaaggatctgaaactgtgaaaattaataaagatatacgtacatttatagataataagcagattccctctgtgaaaacatctgagatcacggcatcgtttaaaacatcaatggaaaaccaaagcagcaaaatgaagcttgatcagcttaccaggttgttatctgatatagaagcattcggaaaaaggctaacgaaatctcggaattttaaagacttagcgagatttaaaggacttgtgaaacgttttgtcaaggaagctgtggacagcggcctttcacatgaaacatcgaaaagctttgacctttacgggaacagcagaacgctgggacttgtgaaagaaatagatgacaaattgatacagcttacggaagagatgatggatcaggaaaaaccggcaattgatttgctggagcgtattggcgaaataaaaggtttattaattaacctttacacatagagagtgatacaatggcaatatcctggaaggaaatgaacgagcttcagcccagagtgatgaagcttttatataatagtattgagaaggacagactatcacacgcttatttgtttgagggaaaaaaaggaacaggcaagcttgatgccgcgctgcttcttgcaaaaagcttcttttgtctggaggatggcgcggagccttgtgagagctgccgaaactgtaaacggatagagtcagggaaccatcctgatctccatcttgttcagcctgatggcttatcaatcaaaaaggcgcaaattcaagcgctccaagaagagttttctaagacaggacttgaatcgcataaaaagctgtatattatttcgcacgcagatcaaatgacagcaaatgcggcgaacagcctgctgaaatttttagaagaacctaacaaagacacaatggccgtcctcatcactgagcagccccaaaggttattggataccatcatttcaagatgccaaacccttccttttcagcctttgcagccgaaagcaattgaagatagactgatcgaacaggacgtctcgcctcatatggcaaggcttctagccaacatgaccaataatgtagcagaagcagtcgaattaagtcgaaatgatgagtttgcagagtctagagcgaaagtgataaaattgtatgaagtcctacaccagcggaaaggacatgcttttttctttattcaagatcaatggatgccctttttcaaagaaaaaacccatcaagaaatgggtcttgatatgctcttattgatatatcgtgatgtgttgtccatccaaataggaaatgaagataaattgatttatcaagacttattccaatcaataaaacagcatgcgctacaatcaacacaacaaagcgttacgaatcagatacttgctgttttagaagcaaagaaacggcttcattccaatgtgaatgtacaaggattaatggagcacttggtgttaatgttgcaggagggataagcttgtacaatgtaattggtgtccgctttaagaaagcgggtaaaatatattattttgatccgaatggatttcatatagaacatgacagctgcgtaattgtagaaactgtcagaggcgttgagtacggccaggtcgtaattgcaaataaacaggtggatgagcatgatgtggtgcttccccttcgaaaagtgatacgtgtggctgacgagcgcgatcttctcattgtagaagaaaataaacaggaagcactatcagcatttgatatctgccaaaagaaagtgattgagcatggcttggatatgaagctggtcgatgttgaattcacgtttgatcgcaataaagtcattttttacttcactgctgacggccgagtcgactttagagagcttgtaaaggatttggcttctatctttaagacaagaattgagctgcgccaaatcggagtgagggatgaggcaaaaatgctcgggggaatcggtccttgcggaagaatgctttgctgttcaacgtttcttggagattttgaacctgtttccattaaaatggccaaggatcagaacttgtctttaaatcctacgaagatttcgggtctttgcggacgattgatgtgctgtctaaaatatgagaacgatgagtatgagacggcaaaagaacagcttccggatataggagaaatgattacgacagcaaacggtcccgcgaaggtcgtcggactaaatattctggaacgggtgcttcaggtggaactgataaaccgtgaaaaagtgatagaatatacttgggaagagctcttggaagagggcgtcgtatccgcacaaaccacagattaacgaggtgtggaaccttggataaaaaagagttatttgatacagtcattaacttagaagaacaaattggctcactgtacaggcagctgggggatttgaagcagcatatcggtgagatgattgaggaaaatcatcatttacagcttgaaaacaagcatttgcgcaaacggctggacgatacgacgcagcagattgaaaagttcaaagctgataaaaaagaatcaaaaacacagaagacagagcaaactgatataggggaaggatatgataatctggcacgtctgtatcaagaaggatttcatatctgcaatgtccactatggtagtgttcgaaaagaagattgtcttttctgtctgtcattcttaaataaaaaatagggaaaaggcttccgcataagacgggagcctttttcaaaggtactgaaaggataagaagatggtttcattacatgatgatgaaagattagattatttgctggcagaggacatgaaaatcatacaaagcccaacagtgtttgctttttcgttggacgctgtgcttctgtccaaatttgcgtacgttccgattcaaaaagggaaaatcgttgatttatgcaccggcaatggtattgtgccgctgctgctcagtacaagatcaaaagcagacattctgggagtcgaaatacaagaaaggctgcatgatatggctgttcgcagcgtggagtataataagttggacgatcagattcagatcatacatgatgacctgaaaaacatgccggagaaacttggacataatcgatatgatgttgtcacctgcaatccgccgtattttaaaacaccgaaacaaactgaacaaaacatgaatgagcatctccgaatcgcaagacatgaaatccactgcacactggaggatgtcatttcagtcagcagcaagctgctcaagcaagggggaaaagcagctcttgttcaccggccgggaaggcttctggagatttttgaactgatgaaggcttatcaaatcgagccaaaacgtgtacaatttgtctatccgaagcaagggaaagaagccaataccattttggttgaaggtatcaaaggcgggcgcccggatttaaaaattcttcctcccttattcgtttatgatgaacaaaatgaatatacaaaagaaatcaggaccattttatatggagacaaataaccatttcttctacgtcgtgaaatgtaaggacaatagctggtatgccggatataccaacgatctgcataaacgagtgaaaacgcacaatgatggaaagggcgcaaagtacacaaaagtaagacgtccggttgaattaatttttgccgagagcttttcaacaaagcgggaagctatgcaggcggaatattatttcaaaaaactaactcggaagaaaaaagagctttatatagaagaaaagcggaacagcaaggaggctgtatatgttaaggcgccaaatgagctttaatggaaagtcggacatggggattctttacttggtcccaaccccaatcggaaatctagaggatatgacattccgggcgatcgacacgctgaaatcggtggatgcgattgctgcggaagatacgaggcaaacgaaaaagctttgtcatgtatatgaaattgaaacaccgctcgtcagctatcacgaacacaataaagaaagcagtgggcacaaaattattgaatggctgaagtcgggaaaaaacattgctcttgtcagtgatgccggtctgccgacgatttctgatcccggagcggaaattgtaaaggattttacggatataggcggttatgttgttccgttgccgggagcaaatgccgcattaacagctcttattgcttcaggtattgtaccgcagccttttttcttttacggttttctcaacagacagaaaaaagaaaagaagaaggagcttgaagcccttaaaaaacggcgggaaacgatcattttttatgaagcgcctcacagattgaaggaaaccttgtcagcgatggcagagatattaggagatcgggaaattgctgtaacgcgtgaactcactaagaaatatgaagagtttatccgaggaaccatatctgaggtcattggatgggcaaacgaagatcagatacgcggcgagttttgtcttgtcgtagaaggaagtaataatgaagaggtagatgaggaagaacaatggtgggaaaccctcactgcgaaagaacatgtcgagcattacatctcgaaaggcgctacgtctaaagaagccattaaaaaagcagcagtcgatcgcaatgtaccaaagcgtgaagtgtacgatgcttaccatattaagcaataaaaaaacgttcttgtgtcataacaagaacgttttttgtacaagaaatgattatttaaggttttgaagctggttttggatttcgctgatgatttgctcagcgccttctttactaagaaccaatttaccgcctgcaagtttaaggttatcatcagaaacttcaccagttacttggcaagtcatgtttggtttatattttttaaggatgattttttcatcatcaacatagatttcaagagcatctttttctgcgattccaagagtacgacgcagttcgataggaataactacacgtcctaattcatcaactttacgtacaataccagtagatttcataaacattctcctcccaagagatacttatttgtttaaattatatttttcttcgtcattattcgacaaaatccttaccttcatagcataacaaggtttccaataatcgtcaatcattttgtttactattgattgtaagaattagttcttatagtcagtaatgtcttagaaactaccgaaataacagcattttataaatatttaataaagctattatcctactaaaaatccttttaaatcaagactttcgaaccaaagttttttatttcatttgattatatacgacaaaattcgacacgaacagactttttttattttcattaaagatttttaattttaattattctttttcagggcgtatgtatatattcttgatcttaaaggctaagatggtatcatagataaaggataaatataaataatattcatatatgatttgcacttatcgccgctctcgtcctttgggcgggagctttttgacattctgattaggaggtttcaagatgccgcaagaaaacaatacattttacattacaacaccgatttattatccgagcggaaaattacatatcggccatgcatatacgacagtcgcgggagatgcaatggcacgttacaaaagattaaaagggttcgatgttcgctatttaacgggaacggacgagcatggacaaaagatccagcaaaaagctgaacaggaaaacattacacctcaggagtatgtggatcgcgcagcggcagatattcaaaaactgtggaagcagcttgaaatctcaaacgacgactttatccgcacgacagaaaaacggcataaagttgtcattgaaaaggtgtttcaaaagcttcttgataacggggacatctatcttgatgagtatgaaggctggtacagcatccctgatgaaacgttctacacggaaactcagctcgttgatattgagcggaatgaaaagggagaggtcatcggcgggaaaagccctgacagcggtcacccagttgaattgatcaaagaggaatcttatttcttccgcatggggaaatacgcggatcgtcttctgaaatactatgaagaaaacccgacattcattcagccagaatcacgcaaaaacgaaatgattaataactttatcaaacctggacttgaggatttggcagtatcacgtaccacttttgattggggcgtgaaggtgccggaaaatccaaagcatgttgtatatgtttggattgacgcactatttaactatttaacggcactcggttatgatacagaaaatgatgagctttatcaaaaatattggcctgccgatgttcatttagtcggtaaggagattgtacgattccatactatttactggccaattatgctgatggcgctggatcttccgctgccaaagcaagtattcgcgcatggctggcttttgatgaaagacggaaaaatgtcgaaatcaaaaggaaacgttgtagatccggttacattaattgagcgctatggtttagacgagcttcgctattacctgcttcgcgaagtgccgttcggatctgacggagtattcacgccggaaggatttgttgagcggattaactatgatttagcaaatgatttaggaaatctattgaatcgtactgttgcgatgattaataagtattttgacggacaaatcggttcttacaaaggtgctgttacggaatttgaccatacgctaacttctgttgctgaagaaacagtaaaagcttatgagaaagcaatggaaaatatggagttctcggtagcactttcgactttatggcagctcatcagccgcacaaacaaatacattgatgagacagctccatgggtgcttgcgaaagatccggcaaaagaagaagaattgcgatcagttatgtatcatctcgctgaatcattgcgtatttcagcggtactgcttcagccattcttaacaaaaacacctgaaaaaatgttcgagcagctgggcattactgatgaatctttaaaagcttgggacagcattacagctttcggccagctgaaagatacaaaagtacaaaaaggcgagccattgttccctcgtttagaggcagaagaagaaattgcttacatcaaagggaaaatgcaaggttcagcaccagcgaaagaagaaacaaaagaagaagagcctcaagaggtcgatcgtttacctgaaattacgattgatcaattcatggatgtagagcttcgcgtagctgaggtcattgaggcagaaccagtgaaaaaagcagaccgtttattgaagctgcagcttgatcttggttttgaaaagcgccaagtggtatccggcattgcgaagcattatacgcctgaagagcttgttggaaaaaaactcgtttgtgtaacaaatctaaaaccggttaaactcagaggagagctttctcaaggtatgatccttgcaggagaagcagacggcgttttaaaggtcgtgtctatcgatcagtcgttaccaaaaggcacaagaattaaataatgataaaacaaaaggtgtttcacgtgtaacaattcgtcgaacaccttttgtgtttcgacaagaaaggagtttttcacttatgttgtttgacacacacgcgcatttaaatgcagaacaatatgatactgatcttgaagaggttattgaacgggcaaaagctgaaaaagttgaacgaattgtcgtagttggttttgaccgtccgacgattacccgtgcgatggaaatgattgaggaatatgattttatttatgcagccattggctggcaccctgttgacgctattgacatgacagaggaagacttagcgtggattaaagagctttctgctcatgagaaagtggtagcgataggggaaatgggactggattatcattgggataaatcacctaaagatattcaaaaagaggtgtttagaaaacaaatcgccttagcgaaagaggtcaatttgcctattatcattcataaccgtgatgcaacggaggatgtcgtgaccattttgaaagaggaaggcgcagaagctgtgggcggaatcatgcactgctttacaggaagtgcggaagtggcaagagaatgcatgaaaatgaatttttatttatcatttgggggaccggtgacatttaaaaatgcgaagaaaccgaaggaagtagtgaaggaaattcccaatgaccggctgctgattgaaacggactgcccgtttctcacaccgcaccctttccgcgggaaaagaaatgagccaagctatgtgaaatatgtggcagaacaaatcgccgaattaaaagaaatgacctttgaagagattgcttccatcacgactgaaaatgcgaaaagacttttccgtataaactgacaaaaaacgctagcgggttttgtaagagcttgtcccttacagcgtttttctataaaagttctacatgctttcttctcctcataggataggtttgtcgacaagtctttcttccgtttctcagtgtatttcaggataatgaagaggacactgagcttttgggagaaagagaagggagggttgacagccttttagatactctatataatctctccgaggagaaggaggcgtttttcatcacacaaaaaatgaaaaagctgttttccgtaaagcttagcaaaagcaaagtcattctggttgctgcttgtttgcttttggcaggaagcgggactgcgtacgcggctcatgagctgacgaaacaatcagtctcagtttctatcaatggcaaaaagaaacatatacgcacacatgcaaatacagtcggtgatcttttggagacgcttgatataaagacaagagacgaagacaagatcacacctgctaaacagacaaagataacagcagacatggacgttgtgtatgaggctgcaaaacctgtgaagcttacaataaacggggaagaaaagacgttatggtcaacagcaaaaacggtcggtgcattactggacgaacaagatgttgatgtgaaagaacaagatcaaattgatcccgtaatagatacagatatttcgaaagacatgaagattaacatagagcccgcatttcaggttactgtgaatgatgcagggaaacaaaagaagatctggacgacttcgactacggtcgctgactttttaaaacagcaaaagatgaacataaaagacgaagataaaatcaagcctgcgttagatgcaaagctgacgaaaggaaaggctgatattacaattactcgtatcgaaaaggtcaccgatgtagttgaagagaagattgcgttcgatgtgaaaaagcaagaagacgcttctcttgaaaaagggaaagaaaaggtcgtccaaaaaggaaaagaaggcaagctaaaaaaacatttcgaagtcgttaaagaaaatggcaaagaagtgtccagagagcttgtaaaagaagaaacagctgagcaaagcaaagataaagtgattgctgtcggcacaaagcaaagcagtccaaaagttgaaacggtcagtgcttcaggtgattcaaaaacagttgtgtcccgcagcaatgaatcaacaggcaaagtcatgactgtatcatctacggcttatacggcaagctgcagcggttgttcaggacatacagcgacaggcgtcaatttaaaaaataatccgaatgccaaagtcatcgctgtggatccaaatgtcattccgctaggctccaaagtccacgtggaaggctatggatatgccattgctgcagataccggttcagcgattaaagggaacaaaatagacgtctttttcccagagaaatcatcggcgtaccgatggggaaataaaacagtcaaaattaaaatcttaaattaatatatacttatgtattcagagggttttgcgccctctgtttttttcgttataatagacaaagtgcattttctgcttattagacgctcgatataagaaaaagtttcatgaatatacaaaagtttttattttgtcttggaggaaataatgaaaattaaagagatcattgtggtcgaggggcgtgacgatacggcccgcatcaaattggctgttgatgcagacacaattgaaacaaatggttcagccatcgatgatcatgtgattgaccaaatccgtttggcccagaagaccagaggcgtcattattttaacggatccggactttccgggagagaagattcgcaaaaccatctcagaggctgtacctggctgtaagcatgcatttttgccaaaacatcttgccaaacctaaaaacaagcggggaattggtgtagagcatgcatcggttgaaagcattagggcatgtttagaaaatgtgcatgaggagatggaagcgcagccgagtgacatttcagctgaggatttgattcatgccggactaataggcgggcctgcggccaaacgccgccgggaacgactgggtgatctgttgaaaatcggctatacaaatggcaaacagcttcaaaaacggctgcaaatgtttcaaattaaaaaaagtgattttatgagtgcgctcgataccgttatgcgggaggaacagaatgaataaagatattgcgacaccgattagaacgaaagagatactgaagaaatacggtttttcttttaaaaagagcttaggacagaatttcttaattgatacgaacattttaaacagaattgtcgatcacgcggaagtgacggagaaaacaggtgtcattgaaatcggcccgggaatcggggctttaaccgaacagcttgccaagcgggcgaaaaaggtcgtggcatttgagattgaccagcgactattgccgattctgaaggatacactgtcaccttacgacaatgtcactgtcattcatcaggacgtgttaaaggctgatgtcaaatcagtcattgaagaacaatttcaagattgtgatgagatcatggtagttgccaaccttccttattacgtaacaacaccgattatcatgaaactgcttgaagaacaccttccgctgaaagggattgtggtcatgctgcaaaaagaagtggctgagcgcatggcggctgatccttcatctaaggaatacggctcgctttcaatcgcggtgcagttttatacagaagccaaaacggtgatgatcgttccgaaaaccgtatttgttcctcagcctaatgtcgattccgcagtcatccgtctgattctccgagacggcccggcagtggacgtggaaaacgaatcctttttctttcagctcatcaaggcaagctttgcacagcgtcgtaaaacgctgctcaataacttagttaacaatctgcctgaaggaaaagcgcaaaaatcaacgattgagcaagtgctcgaagaaacaaatattgacggtaagcgccgaggcgaatccctgtctattgaggagttcgcagcgctgtctaacggattgtataaagcccttttctaaaagggctttttgttttgcgcaccacatggactgccgctacataggctagagaaggacctttcattcaatgataagaaaaaacttggactcagcgaaaaaaggcgctttctcaaggctctttctttcatgatgaggcttagtctatgtgtggagtgaggaatgtgcaatttcaaataggggatatggtagccagaaaatcctatcagatggatgttttgtttcgaattataggaatagagcaaacaagcaaaggaaattcaattgccattttgcatggagatgaagtcaggctgattgctgattcggatttttctgatctggtagcagtgaaaaaagatgagcagatgatgcggaaaaagaaagatgagagcagaatgaatgagtcgctcgaattgctccgccaagattataagctgctcagagaaaagcaggagtactatgcgacaagccaatatcagcatcaggagcattatttccatatgccgggcaaagtgcttcatctggatggcgatgaagcatatctgaaaaaatgcctgaatgtctataaaaaaattggagtgccggtctatggcatccattgccatgaaaagaaaatgtctgcttctattgaagaattgctcgacaaatatcgacctgatatcctggtgatcacagggcatgatgcgtattcgaagcaaaagggcggcattgatgatttgaatgcgtacagacattctaagcactttgttgaaactgttcaaacagcccgaaaaaagatccctcacttagatcagcttgttatttttgcgggggcctgccaatcccattttgaatcactcatcagagcgggtgcgaattttgcgagttcaccgtcaagagtcaatattcatgcgcttgatccggtatatatcgtcgcgaagatcagctttacgccgtttatggaacggattaatgtatgggaagtgctccgtaatacgctgacaagagagaaagggcttggaggtattgaaacaagaggagttctgagaattggtatgccttataagtccaattaacagttgaaaacctgcataggagagctatgcgggttttttattttacataatgatacataatttaccgaaacttgcggaacataattgaggaatcatagaattttgtcaaaataattttattgacaacgtcttattaacgttgatataatttaaattttatttgacaaaaatgggctcgtgttgtacaataaatgtagtgaggtggatgcaatggcgaagacgttgtccgatattaaaagatcgcttgatgggaatttaggtaaaaggctgacgttaaaagcaaacggtggccgccgaaaaacgattgagcgttcgggcattttagctgagacgtacccttctgtttttgtgatacaactagatcaagacgagaactcgtttgaaagagtttcatacagttatgctgatattttgactgagactgttgagctgacatttaatgatgacgccgcaagctcagtggcattttaacgggcagtgaaccttttgtttactgctttttgttttgcccttttttggtttccaataattttaacgaaagttccatctgatttaacaaaagataaaacagtcacatattatcgtgacgtgcacgaatggctatcacttctaaaaaaggggttgtttcgtttgggcagacgtcgtggagttatgtcagatgagtttaaatatgagctggctaaagaccttggtttttatgacacagtaaaaaatggcggctggggcgaaattcgggctcgcgatgccggtaacatggtaaagcgcgctattgaaatcgccgaacagcaaatggctcagaatcagaataaccgataaggatgtgacccgggggacgtgctgttccctggtttttttattttggatataaatacataatgggctgaatatggatatgttcatcctgtacttcaaatgtgatacaatgttcatacttatgtttagatggagaagtaggtgaaagctatgcgtattttagaaaaagcgccagctaagatcaatctgtcacttgacgtcacccgaaaacgcccggatggctatcatgaagtcgaaatgatcatgacgacaattgatttagctgatcgaattgaattgacggagcttgcagaggatgaagtgagggtttcctcccacaaccgatttgtgcctgatgaccaaagaaacttagcttatcaggctgccaagctgatcaaggacagatacaacgtgaaaaagggagtttccatcatgattacgaaggtaattccggtggctgccggtcttgccggcggaagcagtgatgcggcggcgacactcagagggctgaacagactgtggaatttaaatctgtccgcggaaacgcttgctgagcttggagcggaaattggctctgacgtttcattttgtgtctatggcggaactgcattagcaacagggcgcggcgagaaaattaaacatatcagcacgcctccgcactgctgggtcattttagcgaagccgacaatcggtgtttcaactgctgaagtgtacagagcgctgaaactggatggtatagagcatcccgatgtacaaggcatgatcgaggcgatagaagagaagagttttcagaagatgtgcagccgtttaggcaatgtgcttgaatctgttacactcgatatgcatcctgaagttgcaatgatcaaaaaccagatgaaacgctttggtgcagatgccgtgttaatgagcgggagcggcccgacagtgtttggactggttcagtatgagtcgaaggtgcagagaatttataacgggttaagaggcttctgcgatcaagtttatgcggtgagaatgatcggcgaacagaacgctcttgattaaatccgtatgttaagttatattgatcttaaaatattcggattttgggggtaagttcatgaagtttcgtcgcagcggcagattggtggacttaacaaattatttgttaacccatccgcacgagttaataccgctaacctttttctctgagcggtatgaatctgcaaaatcatcgatcagtgaagatttaacaattattaaacaaacctttgaacagcaggggattggtactttgcttactgttcccggggctgccggaggcgttaaatatattccgaaaatgaagcaggctgaagctgaagagtttgtgcagacacttggacagtcgctggcaaatcctgagcgtatccttccgggcggttatgtatatttaacggatatcttaggaaagccatctgtactctccaaggtagggaagctgtttgcttccgtgtttgcagagcgcgaaattgatgttgtcatgaccgttgccacgaaaggcatccctcttgcgtatgcagctgcaagctatttgaatgtgcctgttgtgatcgttcgtaaagacaataaggtaacagagggctccacagtcagcattaattacgtttcaggctcctcaaaccgtattcaaacaatgtcacttgcgaaaagaagcatgaaaacgggttcaaacgtactcattattgatgactttatgaaagcaggcggcacaattaatggtatgattaacctgttggatgagtttaacgcaaatgtggcgggaatcggcgtcttagttgaagccgaaggagtagatgaacgtcttgttgacgaatatatgtcacttcttactctttcaaccatcaacatgaaagagaagtccattgaaattcagaatggcaattttctgcgtttttttaaagacaatcttttaaagaatggagagacagaatcatgacaaaagcagtccacacaaaacatgccccagcggcaatcgggccttattcacaagggattatcgtcaacaatatgttttacagctcaggccaaatccctttgactccttcaggcgaaatggtgaacggcgatattaaggagcagactcatcaagtattcagcaatttaaaggcggttctggaagaagcgggtgcttcttttgaaacagttgtaaaagcaactgtatttatcgcggatatggaacagtttgcggaagtaaacgaagtgtacggacaatactttgacactcacaaaccggcgagatcttgtgttgaagtcgcgagactcccgaaggatgcgttagtcgagatcgaagttattgcactggtgaaataataagaaaagtgattctgggagagcccgggatcacttttttatttaccttatgcccgaaatgaaagctttatgacctaattgtgtaactatatcctattttttcaaaaaatattttaaaaacgagcaggatttcagaaaaaatcgtggaattgatacactaatgcttttatatagggaaaaggtggtgaactactgtggaagttactgacgtaagattacgccgcgtgaataccgatggtcgcatgagagcgattgcatccatcacgctggatcacgaatttgttgtacatgatattcgtgtgattgatggaaacaatggtcttttcgttgcgatgccgagtaaacgcacccctgatggagagttccgcgatattgctcatcctattaattcaagcacgcgaggaaagattcaagatgccgtgttaaatgagtatcatcgtctgggtgacactgaagcattagaattcgaagaagctggagcttcttaaaaaataaccaaaaagcaaggactgctgaaagggctgacataagccttttgccggcggtccttttttaattctgatttttcaaacttagttgcactcaatagaaaattcttgcacttcatgaagtctccttgaaatcagaagatatttaggatatatttttctatggataaaagggatattggaggccaataaatggataagcggtttgcagttgttttagcggctggacaaggaacgagaatgaaatcgaagctttataaagtccttcatccagtttgcggtaagcctatggtagagcacgtcgtggacgaagccttaaaattatctttatcgaagcttgtcacgattgtcggacatggtgcggaagaagtgaaaaagcagcttggtgataaaagcgagtacgcgcttcaagcagaacagcttggcactgctcatgctgtaaaacaggcacagccatttcttgctgacgaaaaaggcgtcacaattgtcatttgcggagatacgccgcttttgacagcagagacgatggaacagatgctgaaagaacatacacaaagagaagcgaaagctacgattttaactgcggttgcagaagatccaaccggatacggccgcattattcgcagcgaaaacggagcggttcaaaaaatcgttgagcataaggacgcctctgaagaagaacgtcttgtaactgagatcaacaccggtacgtattgttttgacaatgaagcactatttcgggctattgatcaggtgtctaatgataatgcccaaggcgagtattatttgccggatgtcatagagattcttaaaaatgaaggcgaaactgttgccgcttaccagactggtaatttccaagaaacgctcggagttaatgatagagttgctctctctcaggcagaacaatttatgaaagagcgcattaataaacggcatatgcaaaatggcgtgacgttgatcgacccgatgaatacgtatatttctcctgacgctgttatcggaagcgatactgtgatttaccctggaactgtgattaaaggtgaggtgcaaatcggagaagatacgattattggccctcatacggagattatgaatagtgccattggcagccgtacggttattaaacaatcggtagtcaatcacagtaaagtggggaatgatgtaaatataggaccttttgctcacatcagacctgattctgtcatcgggaatgaagtgaagatcgggaattttgtagaaattaaaaagactcaattcggagaccgaagcaaggcatctcatctaagctatgtcggcgatgctgaggtaggcactgatgtaaacctgggctgcggttcaattactgtcaattatgatggaaagaataagtatttgacaaaaattgaagatggcgcgtttatcggctgcaattccaacttggttgcccctgtcacagtcggagaaggcgcttatgtggcggcaggttcaactgttacggaagatgtacctggaaaagcacttgctattgccagagcgagacaagtaaataaagacgattatgtgaaaaatattcataaaaaataatcctaaattcggaggtttatccatgtctaatcaatacggagataagaatttaaagattttttctttgaattcgaatccagagcttgcaaaagaaatcgcagatatagttggagttcaattagggaaatgttctgtcacaagatttagtgacggggaagtccaaattaatatcgaagaaagtattcgcggatgtgattgttacatcatccagtctacaagtgaccccgttaacgagcatattatggaactgctgattatggtagatgcgttaaaacgcgcttctgcaaaaacgattaacattgttattccttattacggttatgcgcgtcaagacagaaaagcaagatcccgtgagccaatcacagctaaacttttcgctaacctgcttgaaacagccggtgcgactcgtgtgattgcacttgacctgcatgcgccgcaaattcaaggattctttgatataccgattgaccacttaatgggtgttccgattttaggagaatattttgaaggcaaaaatcttgaagatatcgtcattgtttcacctgaccatggcggtgtgacacgtgcccgcaaactggctgaccgactaaaagcgccaattgcgattattgataaacgccgtccgcgtccaaacgtggcggaagtcatgaatattgtaggtaacatcgaagggaagactgctatcctcatcgatgacattattgatactgcaggtacgattacacttgctgctaatgcgctcgttgaaaacggagcgaaagaagtatatgcatgctgtacacaccctgtactatcaggccctgcggtagaacggattaataattcaacaattaaagagcttgttgtgacaaacagcatcaagcttcctgaagaaaagaaaattgaacgctttaagcagctttcagtcggaccgcttctggcagaagcaattattcgcgttcatgagcagcaatcagtcagctaccttttcagctaaaccgattttgaaaggtttaaacctttatcgttttgggtattgtttgtaataggacaactaaaacgacaataggatggtgctgaatatggcaactttaacggcaaaagaaagaacggactttactcgttcgtctcttcggaatatccgtacttcaggacatgttccaggtatcatatatgggaaggatacgggtaacaaacctgtgtcattagacagtgtggagctcatcaaaacgctgagggacgaaggcaaaaatgcagtcattacgcttgaggtcagcggagaaaaacactcagtcatggtaacagacctgcagacggacccgctgaaaaatgaaatcactcatgctgattttcaagtagttaatatgagtgaggacattgaagtggaagttccgattcatctgaccggagaagccattggagtgaaaaacggaggcgtactgcagcagccgttatatgcacttactgtaaaggccaagccaaaagccattccgcaaacgattgaggctgatatttcaagcctcgatgtaaatgaagtactgacgattgcagatttgcctgctggcggtgactactcctttaatcatgaatcagatgaggttgtggcttcaatccttcctccgcagcagcaggaagcagctgaggtcgatgaagaggaatctgccgatgctcagccagaaggtgaaaacgaacaataatagcttaaggcgtaaccctcccgcggttacgtcttttgtgctagaatgagaagaattatagcccgtttatgaagacgggagttatgtgactaagggaggattcgccatgcttgtgattgccggtctcggaaacccggggaagaactatgaaaacacacggcataatgtcggatttatggtgatagatcagcttgcaaaggaatggaatatagagctgaatcaaaataaatttaacggattatacggaaccggatttgtttccggcaaaaaggttctacttgttaaaccgcttacatatatgaatttatcaggagaatgtttgcggcctttaatggactactatgatgtcgataacgaagatttgacagtcatttacgacgaccttgaccttccgactggcaagatccgtttaagaacgaaaggaagcgccggagggcacaatggcatcaaatcactgatccagcatcttggaacatccgagtttgaccgtatccgcatcggaatcggccggcctgtaaacggcatgaaggtcgttgattatgtgttaggctcctttaccaaggaggaggcacctgagatcgaagaagcggttgataaatctgtgaaggcttgtgaggcttctttgagtaaaccgtttttagaagtcatgaacgaatttaacgcaaaggtataaaatgtaacaacaaagtccatactacaccaaaatgactttttcatcaggaggtcccttgtatggctttgcattattattgtcgtcattgcggagtgaaagtaggcagtctcgaatcttcaatggtatcgacagactcacttggatttcagcacttaacaaatgaggaaagaaacgatatgatttcttataaagaaaatggagatgtccatgttttgacgatatgtgaagactgccaagaggcgcttgaccgaaatccgcattaccacgaatatcacacatttattcaataaaaagctttggtgtagacactagaccaaagcgtttttctgttctcgcaggaaacagagaggaggggccatatggacaacattcaaacctttataaaagaaagcgatgactttaaatccatcatcaacggtttacacgagggcctgaaggaacagctgctcgcgggtctgtcgggttccgcgcgttctgtttttacttctgctctggctaatgaaacgaataagcctatctttctcatcacccataacttatatcaagcccagaaagtaacagatgatctgacttcacttctagaggatcggtctgtccttttgtaccccgtcaatgaactcatttcatcagaaatcgcagttgcaagccctgaattgcgggcgcagcgattagaagtcattaatagactaacgaatggagaagcgccaattgtcgttgctccggtagctgcaatcagaagaatgctgccgcctgttgaggtgtggaaaagcagccagatgctcattcaagtaggccatgatattgaacctgaccagcttgcctcacggctggtagaggtagggtatgagcggtctgatatggtttctgcgcccggggaattcagtattcgcgggggaatcattgacatttatccgttgacttcagagaatccggtgagaattgaactttttgacaccgaggtggattcaatccgcagctttaattcagatgatcagcggtcaattgagacccttacctcgatcaatatcggtcccgcgaaggaattaattatcagaccggaagaaaaagcgcgggcgatggagaaaatcgatagtggtcttgccgcgagcttgaaaaaattaaaggctgacaaacaaaaagaaatacttcatgcgaatatttctcacgataaagaacgcttgtctgaaggccagacagatcaggagctcgtgaagtatctctcatatttctatgaaaagcctgctagtttactagattatacacctgataatacacttctgattttggatgaagtcagtcggattcatgagatggaagaacagcttcaaaaagaagaagcggagtttataacaaatcttcttgaggaagggaagattttgcatgacattcgtttgtcattcagcttccaaaaaatagtggttgagcaaaaacggcctctgctgtactactctttatttttgcggcatgtacaccatacgagcccgcaaaatatcgtcaatgtgtcaggccggcaaatgcagagtttccatggccaaatgaacgtgcttgcgggcgaaatggagcgttttaaaaaatcaaatttcactgttgtgttcttaggagcaaacaaggaacgtacacagaaattgtcatctgttttggctgattatgatatcgaggctgccatgacagacagcaaaaaagcgcttgttcagggacaggtctatatcatggaaggcgagctccaatcgggatttgagctgccgttaatgaagcttgccgttattacggaagaagaactgttcaaaaaccgtgtaaagaagaagccgcgaaaacagaagcttaccaatgcagagcgcatcaaaagctattctgagcttcaaattggagattatgtcgttcatattaatcacgggatcggaaaatacctggggatcgaaactcttgaaatcaacggcattcataaagactatttaaatatacattatcagggcagtgacaagctttacgtccctgtagaacaaattgatcaggtccaaaaatatgttggctccgaaggaaaagagccaaagctgtataaattaggcggaagtgaatggaagcgggtcaagaaaaaagtagagacatccgttcaggatattgctgacgacttaattaagctgtatgccgaaagagaagcgagcaagggctatgcgttttctcctgaccatgagatgcagcgtgaattcgaatcggctttcccttatcaagagactgaggatcagctccgttcgattcacgaaatcaaaaaagacatggaaagagaacgtccgatggaccgcttgctgtgcggagatgtgggctacggtaaaacagaggttgccatacgtgccgcgtttaaggcgatcggtgacggaaagcaggtagctctgctcgttccgacaacaattttggcacagcagcactatgaaaccataaaagagcgcttccaggactatccgattaatatcggccttctcagcaggttcagaacgcgaaaagaagcaaacgaaacaatcaaagggctgaaaaacggaacggttgatatcgtcatcgggacgcatcggctgctatcaaaggatgtcgtgtataaagacttagggctcctcatcattgatgaagagcagcgtttcggtgtaacccataaagaaaagatcaagcaaataaaagccaatgttgatgtattaacgttaacagcaacaccgattccgcgtacgctgcatatgtctatgcttggcgtaagggacctttcagtcatcgagactccgccggaaaatcgcttccccgtacagacgtatgttgtggaatataacggcgctcttgtcagagaggcgattgaacgtgagcttgcacgcggaggccaggtctatttcttgtacaaccgggtagaggacattgagcggaaagcggatgaaatttcaatgctagtccctgacgcgaaggtagcatatgcgcatgggaaaatgacagaaaatgaattagaaaccgttatgctaagttttcttgaaggagaatcagacgttctcgtcagcacaaccattatcgaaactggcgtggacatcccgaacgtcaatacgctgatcgtatttgacgccgacaagatgggactttctcagctttaccagctgcgggggcgtgtcggccgttctaaccgtgtggcgtatgcgtacttcacgtatcgccgggataaagtgctgacagaagtggctgaaaaaaggctgcaggctattaaagaattcacagagctaggttccggttttaaaatcgcaatgcgtgacttaacgattcgcggagctgggaatcttcttggtgcccagcagcatggcttcatcgattcggtcggatttgacctctattcacaaatgctgaaggaggccattgaggagcgtaaaggagacacagcgaagacagagcagtttgaaacagaaattgatgtcgagcttgatgcgtatattccggaaacttatattcaagacggcaaacagaaaattgatatgtataaacgcttcaggtctgtggcgacaatcgaagagatgaatgagcttcaagatgaaatgatcgaccgctttggaaactatccaaaagaagtcgaatacttgtttactgttgcagaaatgaaagtctatgcgagacaggaacgtgtcgagctgattaagcaggataaagatgctgtcagattgacgatttctgaagaagcaagtgctgaaattgacgggcagaagctgtttgagcttggcaatcaatatggcagacaaatcggactgggaatggaagggaaaaaactcaaaatctccatacagacgaaaggccgtagtgctgatgaatggctcgacaccgtgctgggcatgctgaagggcttaaaagatgtgaaaaagcaaaccatttcatcaacgtaaattttgttactctctggtgtatattacatttgatgtgacggatactaatttcaagcgaggcggaaggtacataaagtaactgctttaggtctttcccacatgtatataccatcaaatgaaagagaggcaccagagatgaaagcaaccggtatcgtacgtcgtattgatgacttaggtcgggtcgtgattcctaaagaaattcgaagaactctgagaatcagggaaggcgatccgcttgagatttttgtagatcgtgacggagaagtgattttgaaaaagtactctccgatcagtgagcttggagactttgcaaaggagtatgcagacgcgctttacgacagcctcggccattcagtgctgatttgtgatcgtgatgtgtatattgccgtgtccggcagctccaaaaaagattacttaaacaagtcaatcagcgaaatgctggaaagaacaatggatcagcgcagctccgtgcttgagagtgatgcgaaatcagtacagcttgtgaatggaattgatgaggacatgaattcttatactgtcggcccaattgtggcgaacggtgatccgataggtgctgtggtgatcttttcaaaagatcagacaatgggcgaagtagagcataaagccgttgaaacagcagctggatttttggctcgtcaaatggaacagtaggtcttattcctttcttcgaaaataggtatgtaaagaacagctctccttgggacgctgttctttttcatgcgtgccgaaaaaggaatccaagggttgggatgtggtataataacctcgtttttatttgtgccgcggtaatacgtgaaccgtattgcccctgacgttgggaaggagcttttggatggacgattcaataggcgttaaacggcattggatttggcagggggcttttgttttaattctggcaggcatcatcacaaaaattttaagcgctgtttacagagtcccgtttcaaaacattgtcggcgatgttggattttatatatatcagcaggtatatccctttcttggtattgcggtcatgctgtccacatcaggatttccagtcattatttcaaagctgatgaatgattatagtgaaaaaaatcatcacaccatattaaaaatatcagcgttgtttttgtctttaatcggtattttattatttctttgtttatatctgggtgctgttcctattgcactctttatgggagattcgcatctagccgtgttaattcaagtggccgcatacgcgtttctgctgttcccatttgtcgcgttgcttagaggcggttttcaggggcggcacgaaatgctcccttcagccttatcacagatgacagagcagtttctgcgtgttgcggtgctcttgggtttatcattttggctcgtgaaaaagggagcctcgctttatactgcgggagcggcagccgcttcaggctctcttgccggaagtttggttgcattgataatactgggttttttttggttcaaaacgaaaagagacaaccaaacggataggcaaaacgaaaatgtcatcacaacaaaagaattgacgaaaaaactgcttttatattcggttacaatttgtgtaagcagtttgctgcttttgtttatccagctcgttgatgctttgaatttatatgcattgctttcgggtggtgaggcaagcgaagaagcaaaacgcttaaaggggatctatgatcggggacaacccttgctgcagctcggctcagtttttgccgtaagcattgcgacgtcactcgttccgtatatttctatggctgtaaaaaacaaagagctgaagatcatgaaagaaaaaatcacgtcatctttgaaactatgccttgtgctcggtacaggcgcatcggctgggttgatttgcattcttaagccggttaatatcatgctgtttcaaaatggagaagggacaggtgcgttacaagtatttagctgctccattttgtttgcatccttggcggtaacggcagcggcagtcttacagggagcggggtacacagtttttcctgcgatagcggtgggcgcgggtgttgcagtgaaatgggtgttaaacacacttttggttccgcgctatgggattgaaggcgcatcgcttgcgacagctgcttcctttgcggctgtcgccggccttaacttgtatcagcttcggcaaaaggaatggctcgataagcttagaggcgttttgattccgattattggatctgctcttttgatgtcagctgttttgcttgcgtatacgcgtctctggactttcttgtttcctgcaacaggaagaggagcggctgtgattgagagtctttctgctgttgccattggtggcgcggtgtttatttattgtatgatgagattgggaatatttacagatgaagagctgaacagtgtgccattcggcagcaagttaagcaaattcatgagaaggagagaacaaaatggcgggtaaaattacagtcgtcggacttggtgccggagacatggaccaattgacaattggtatacacaagctgctgacgaaggcagatacgctgtatgtcagaaccaaggatcatcctttaattgaggagcttgaaaaagaaacgaagaacatccgtttctttgatgatatatatgagaaacatgatcagttcgaggcggtatatgaagaaattgcagatatcctctttgaagcggcgcggcgtgaggacgtggtttacgctgtgccgggacacccttttgtcgcagaaaaaacagttcagctgctgacggagcggcaggaaaaggaaaacgttcaagtgaaagtcgcggggggacaaagtttccttgatgccacattcaatgccttgcaaattgacccgattgaaggttttcaatttgtggatgccggcacattgtccgcggatgagcttgagctcagacatcatctgatcatatgtcaggtttacgaccaaatgacggcttctgaagtcaagctgacattgatggagaagctgcctgatgattatgaggtcgtcattgtgactgcagcaggcagccgtggcgaggagatcaggacagtgccattatttgagctggaccgcaatgtcgctttgaacaacttaacaagtgtgtatattccgccgattaaagaagagaagctgctttatcacgaattctccacgttccgaagcatcatcagagagcttcgcggacctaatggatgtccgtgggataaaaagcagacgcatcagtcattaaagcagtacatgattgaagaatgttatgagcttctcgaagctattgacgaagaagacacagaccatatgatcgaagagcttggcgacgttttgcttcaggtcttgcttcacgcgcaaattggtgaagatgaaggttatttcacaattgatgatgtcataaaaggaatcagtgaaaaaatggtccgaagacatccccatgtgtttaaagatgttaaggttcaggatgaaaacgatgttttagccaattgggaagatataaaaaaggccgaaaaaaatacatctgaatcatcattactagacagcgtaccgaaaacccttccagctctttcgaaagcagctaaattgcagaaaaaagcagcgaaggtcggttttgactgggaagacgtcagcgatatttgggaaaaggtaagtgaggaaatgaaggaattttcttctgaggtttctgaagctcctcacgaacacaatcttaaagctgagtttggcgacattttgttcgcgctggtgaatgtagcccgcttctacaaaatagagccagaggaagcgctgaccatgactaatgacaaattccggagacggttctcgtacattgaggaaacagcgaaggaagagggagtcgagttggctgatatgtcccttgaggacatggacaaactgtggaatgaagcaaaagaaactgagaggagatcatagatatgagattagataaatttttgaaagtatcacggctgatcaaacggcgtacactagcgaaggaagtagctgaccaaggacgaatctctattaacggaaaccaagctaaagctagctctgacgtaaaaccgggagatgaactaacggtccgcttcggccaaaagcttgtaacggttcaagttaatgaattgaaagacacgacgaaaaaagaagaagctgcaaacatgtacacgattctaaaagaagaaaaactcggcgaataggcttgttctaaaaaaatcccccacctcatacaatgcagtaataatgctaaaagtatcgaggatatgggggctgaatagatgaattcatattatgatcaaaaaggttcttcgtctgttccggaacagcatgatgtgacaatgaaaggccggaagcatttagatatttctggggttaagcatgtggagagttttgataacgaagaattcctgctggaaacggtgatgggaatgctctccgtcagaggccaaaacctgcagatgaaaaatcttgatgtggaaaaagggattgtttcgattaaaggcagggtatttgatttagtgtacttagacgaacaacaaggggataaagctaaagggttttttagcaagttgtttaaatgacgctgacgacacaattctatacaatgctagcgatgtccggtatgggtctctggcttggtgcttcgcttgatacataccggctctttgtcattcgtgccaaaacagccagatggctattatttattcatgatattcttttctggattgtgcaagggctgcttttcttttatgtcttgcttcatgtaaatgagggagaattcaggatttacatctttttagcggttctgctgggcgttgcgacgtatcagagcctttgcaaacgaatctatataaaaatactgaaattcgtcatttaccttgttgcttctgtttatcaattcttcaaaaaactcattcagcacgtgttatttcgtcctattgtgtggacatgcggagcgatcatctggctggcggcatttttattcaagaaaacatacagcctgataggttttctcctgctgtgtctatataaaatagtcatggttctgtgttttccgatccgttttatcgcgaaacaatgtttgaaacttcttcctgtgaaaatgcgtctaacttttagacgttattttgaaaaaggtgcaggatttctcaaaaagaagaagaaactattgataaccataagaacgaccattacacggtttttgaagaaatgaaaggaggaccgtctggtttgaatttttccagggaacgaacgataactgaaatacaaaacgactataaagaacaagtagaacggcaaaatcagctgaagaaacgaagacgcaaagggctgtacagacggttaactgtattcggcgccctagtattcctgacggcaattgtgctggcaagctctgtatggtcccaaacatcttcccttagtgcaaaagaagaaaagaaagaacagcttgaaaaagaactgaaaagtttaaagacaaaacaaacggatttaaaagaagaaatatccaaattgaaggatgaggattacgtcacagagcttgccagaagggacttattcatgtctggagacggagaaattatcttcaatgtggagaagaagagcaagtagccttgttgacacttaaatttttatttaggtataattaagcaaacgatctttttataagcctaaggaggagcactttttttatgtcgattgaagttggcagcaagttgcaagggaaaattacaggtattacaaattttggagcatttgttgaattgcctggaggctcaaccggtctcgttcacattagtgaggtagctgataattatgtcaaagacattaacgaccacttaaaagtcggcgaccaagttgaagtgaaagtcatcaacgttgaaaaagacgggaaaattggtttatctattaaaaaagctaaagaccgtccgcaagccagacctagaaatgatttccgtccgaaagaatcttttgaacagaaaatgaataagtttttaaaagacagcgaagatcgcttgtcatctttaaaacgcaatacggaatcaaaacgtggagggcgcggagcaagaagaggataacttgctgctttctataaaataaatgaagcatccgttcatcccgacggatgcttttttattatcctcatcctctttaagagtcagaaaattacaacattaaagtttctgttgacgaaagagacaaacctttgtattatataacttgtgcttagaagcacaaaacaatatggcggtgtagctcagctggctagagcgtacggttcatacccgtgaggtcgggggttcgatcccctccgccgctaccatatttgtttggcccgttggtcaagcggttaagacaccgccctttcacggcggtaacacgggttcgaatcccgtacgggtcatcctaaaaaatcggtttctcttgcagaagccgatttttttcatttttagacaacattccggaaattcttttcataaacgaatatcaaggcagaaaccgtcgaagatttctttggtattgttaccttcttttgacaaaatcctatctgtgctttcgctataatgacaggcaacgaatataacaggtgggagatgagaggaatggaaaaagcagaaagaagagtgaacgggccaatggcgggacaagctttggaaaaactccaatcgttttttaacaggggcacgaagctggtgactcatcatttgcattcactgtttttctataaaggattcatttatgttgttatcggatttttgcttggacgggctttcatattatccgaggtgcttcctttcgcacttcctttctttggagcgatgcttctcatcagaagagacaaagcgttttatgcggttttggctgtgcttgcaggtgcgctgaccatatctccaaagcactcattgctcatactggcggcattgctggcattcttcgtattttctaaagtggctgccttcattaccgacgatcgtgttaaagcactcccgattgtcgtgttcttctcgatggctgcagcaagagccgggtttgtttatgcccaaaatggcgtatttacaacctatgattatgtaatggctatcgttgaggctggactgtcgtttatcttaacactgattttccttcagagccttccgatttttactgtgaaaaaagtgaaacaatcattaaaaatagaggaaattatctgctttatgattcttattgcctctgttttaacggggctggctggcttgtcctaccaagggatgcaggcagaacatatattggctcgttatgttgtgttgagtttttcctttattggcggagcaagcatcggctgtacggttggtgttgtgaccggcctgattcttggcttggcgaatatcggaaacctatatcaaatgagtctgcttgctttttccggtttattgggcggtttgctgaaggaaggaaaaaaagcgggtgcagcaatcggtctgatcgttggttcacttcttatatctttatatggtgaaggctctgccggtctgatgacaacgctctatgagtcattaatcgcagtcggcctgtttttgctcacacctcaatctattacaaggaaagtggcgagatatattccgggaactgtcgagcatcttcaagagcaacagcaatacgctagaaaaatccgtgatgtcactgctcagaaggtagaccagttctccaatgtatttcacgcgctgtctgaaagctttgcaaccttttaccaagcgtcagacgaacagacagatgacagcgaagttgatctgttcttaagcaaaatcacggagcattcctgtcagacgtgctacaagaaaaacaggtgctgggtacagaactttgataaaacatatgatttaatgaaacaagttatgcttgaaacagaggaaaaagaatatgcatcaaaccgaaggctaaaaaaagagtttcaacagcattgttctaaatccaagcaggttgaagagctgattgaggatgagctcgcacatcatcatgcccatttgacactcaagaaaaaagtccaagacagcaggcgccttgttgctgaacagcttttaggtgtttctgaggttatggccgacttttctcgggaaataaaaagagagcgagaacagcactttctgcaggaagagcaaatcatagaagcgcttcagcatttcggaattgagattcagcatgtcgagatctatagccttgaacaaggaaatatcgatattgaaatgaccattccgttcagcggacatggagaaagtgaaaaaatcattgcccctatgctgtctgacattctggaagaacaaattcttgtgaaagctgaacagcactctccgcatccgaatggatacagccatgtcgcctttggatcaacaaaatcatacagggtgtccacgggagctgctcacgctgcgaagggcggcggccttgtctccggcgacagctacagcatgatggagcttggagccagaaaatatgctgcagcaatcagtgacggaatgggcaatggcgcaagagcgcactttgaaagcaatgaaacgatcaagcttcttgaaaaaatccttgaatcgggaattgatgaaaaaatagcaattaaaacgatcaacagcatactgtctctaaggacaactgacgaaatatattccacgcttgacctatctattatcgatcttcaagatgccagctgtaaatttttgaaggttggatcgacgcctagctttatcaaacggggtgaccaggtcatgaaagttcaagcgagcaatctgccaatcggtattattaatgaatttgatgtggaggttgtgagtgaacagctgaaagctggtgacctcttaattatgatgagtgatggcatttttgaggggcctaagcatgtggaaaatcacgacttatggatgaagcgtaaaatgaaagggttgaaaacaaatgacccgcaggagattgcagatttgcttatggaagaagtcatccgcacaagatccggccaaattgaggacgatatgactgttgttgttgtccggattgatcacaatacaccgaagtgggcatccattcctgttccggcaatctttcaaaacaaacaagaaatttcataacgcttccgtataaatcaaatttcttctggcgaagatgggaatatatgaatctgagaatcctcgtattctccaggaggaatgaatgtgaacaacggacatttaaatcaaattttgctgataacggatggctgctcaaaccatggggaagacccgcttgcaatggctgcttttgctaaagagcaggggattacggtaaatgtcattggtataatggaagaaaatcaaattgaccctgaggcaatgaaggaagtcgaagggattgcacttgccggaggaggtgtgcaccaagtcgtttatgcatctcagctttcacaaactgttcaaatggtaacaaagaaagcgatgacgcaaaccttacaaggtgtagtcaatcaagaactgaaacagattctcggaaagaatgtggaaatggaagagctttctccggaaaaacgcggcgaagtcatggaagtggtagacgagcttggagaaacggtgcatcttcaggttttggttcttgttgatacaagtgcaagtatggcgccaaagcttccaacagtaaaagaggcgctgattgatttgtctgtaagcctcaattcccgaatcgggaataacgaatttgcgatgtgtatatttcccgggaaaaaacaagaggtcgagcttgtgctgaactggacaccgaagctgcaatctctttccacactctttgcaaagctttcgacaggcggcatcacgccgacaggtccggcgattcgtgaagcgacactgcagtttgaaaaaatacgctcaagaaggggcatgctggcagatgatgaacgacgctttgacgagtttggcatgtagcctcaagccgggtacgacaatcaaaggcaagtggaatggaaacacttatacattgcgtaaacagcttggtaaaggggccaatggaattgtgtatttggcagaagcatcagatggacatgttgccttaaaggtgagtgatgacagcctgtctattacttctgaagtgaatgtcttgaaatctttctcaaaggcccagtccgttacgatggggccttctttttttgatacggatgatgcctatattcccagtaccaatacgaaagtttcattttatgcaatggaatacataaaagggccgctgcttttgaagtatgtcagtgataaaggagcagagtggatacctgtattaatgattcagctgttatccagcttatcggtgcttcaccagcaaggatggatattcggcgatcttaaacctgataatctgatcgtaactggtccgcccgcaaggatccgctgcattgatgtgggcggcacgacaaaggaaggccgggcgataaaagagtatacggagttttatgacagaggctattgggggtatggaacaagaaaggcagagccatcctatgatctgttcgcagttgccatgattatgatcaacagtgtgcataaaaaagaatttaagaaaacgaaccagcccaaagaacagcttaggtctctcatcgaaggaaaccctctgcttcaaaagtataaaaaagtgcttttttcaaccttgaacggagattatcaatccgcagatgaaatgaaaaaggatatgctagacgcggggcaaaaagcagcacaaagaaaacagcctataaaagcatcaccgcagcctgccacacgacatagacagcaaaaaccgcgccaaggaaaaataacgaagacgcgatataccccaaaacagaaaccggctaagtcgggggggttatttgaaacaacgctgatcgtgatcagtgttttagcgctttatttcgcctatattatctttttcttaatctgaatggtgcaaactgcagagcctatgcttcttctttgcttggaggggttgaaagtgttaggatatgaatatctttaaaatacctgctcattgtgaggaggacattgtgaaaagtgtcaaagattttttaaacaaacacaatcttacgttaaaaggggcgacgatcattgtaggcgtttctggcggtccggactcaatggctcttcttcacgcgttgcatacgttatgcggccgttcagcgaatgttattgcagctcacgttgaccatcggttcagaggtgcggaatccgaggaggacatgcgttttgtccaagcttattgtaaagctgaacagctcgtgtgcgaaacggctcaaatcaatgtaaccgcatatgcacaggaaaaaggactcaataagcaggctgcagcacgcgattgccgctaccagttttttgaggaaatcatgtcgaagcaccaagcggactatctggctcttgcgcatcatggtgatgaccaggttgaaacaatgcttatgaaactggctaagggtacgcttggaacgggacttgcgggaatgcagccggttagacgttttgggacggggcggatcatcaggccgttcttaaccattacaaaggaagagatccttcactattgccgtgaaaacggcttgagctaccggacggatgaaagcaacgccaaagatgactacacaagaaacagattcagaagaacagtgctcccgtttttgaagcaggaatctccggatgtgcataaaaggtttcagaaagtgagtgaagcactgacggaagatgagcaattcttacagtcattaacgaaagatgaaatgaataaagtaatcacaagccagtctaatacatcagttgaaatcaattcctctcaattgcttgccctcccgatgcctttacaaagaagaggagttcaactaatattaaactatctttatgaaaacgttccatcatccttttcagcccatcacattcagcagtttctcgattgggcggaaaatggcagtccttcaggagtactggactttccgaaaggactgaaggtggtcaaatcatatcagacatgtttgtttacatttgaacaatggcagtgcaaaaatgttccctttgaataccaaattagcggagcttctgatgaaacggcagtgctccctaatggatatctgatagaggcaaggcattatgcggactcgcctgaagaacatgggaatgctgtttttatcacaagtgaaaaaaaggtgcgatttcccttaacaatccggacgagaaaagctggagaccggatcaaactaaaagggatgaacggctcaaaaaaggtaaaggatatatttattgataagaaactgcctctccaagaaagagacaactggccgattgtgacggacgcaagcggtgaaattatctggatacctggcttgaaaaaatcaatttttgaagatcttgtgattccaaacagcgaccgcattgtattacaatatagacagcatgaaaagtgtagggggcaagcaaaatcatgatgaaacatgatatcgagaaagtactgatctcagaggaagagatacaaaagaaagtaaaagagttaggtgcagaattaacgagcgagtatcaagatacatttccgttggcaatcggtgtgttaaaaggagcacttccttttatggcggatcttatcaagcatattgatacatatttggaaatggatttcatggatgtatcaagctacggaaattctacggtttcttctggagaagtaaaaatcattaaagatttggatacatctgtagagggccgggacatcttaattattgaagatatcatcgacagtgggttaaccttaagttatctcgtagagctcttccgataccgtaaagcaaaatcaattaagattgttacccttttggataaaccgagcggaagaaaagcggacatcaaagcagactttgtcggttttgaagttcctgacgcgtttgtagtgggttacggacttgattatgctgagcgctatcgcaatctgccttatatcggagtgttaaaaccggcagtttatgaaagctgatcggcagcctgcttccgagatggttattgtttgtattggaatgattttctatggtactattgaacatagttgtgcttactgtgggaggaggtaaggaatgaatcgggtcttccgtaataccattttttatttacttattttattagtagtaatcggggttgtgagctacttccagacctcaaatccgaaaacagaaaatatgtcgtacagtacgttcatcaaaaacctggatgacgggaaagttgatagcgtatcggttcagcctgtcagaggtgtttatgaggtaaaagggcagctgaaaaactacgacaaagatcaatactttttgactcatgttcctgaaggaaagggagcagaccagatatttaacgctttgaaaaagacagacgtaaaggttgagcccgcgcaagaaacaagcggatgggtgacgttcctgacgaccatcatcccatttgtcattatctttattctgtttttcttcctgctcaatcaggctcaaggcggcggcagccgtgtcatgaactttggcaagagtaaagcgaagctgtatacagaggaaaagaaacgcgtcaaatttaaagacgttgcaggggcagacgaagaaaagcaagaacttgttgaagttgttgagtttctgaaagatccccgcaagtttgccgagctcggcgccagaataccgaaaggcgtgcttttagtcgggcctccgggtaccggtaaaacattgcttgccaaggcttgtgcgggagaagccggcgtacctttcttcagcatcagcggatctgatttcgttgaaatgtttgtaggggtcggtgcttcccgtgtgcgtgacttgtttgaaaatgcgaaaaagaatgcgccttgtttgatcttcattgatgaaattgacgcagtcggacgccagcgtggcgctggtctcggcggtggacacgatgaacgtgaacagacgctaaaccaattgcttgttgaaatggacggattcagcgctaatgaaggaattatcatcattgctgcgacgaaccgtgcggacatcttggacccagccttacttcgtccgggacgttttgaccgtcaaatcacagtggaccgcccagatgtcattggccgtgaagctgtattgaaagtccatgcgagaaacaaaccgctggatgaaacggttaacctaaaatcaattgccatgagaacaccaggcttctcgggcgctgacttagaaaacctcttgaatgaagctgcgcttgtagcagctcgtcaaaacaagaaaaaaatcgatgcgcgtgatattgacgaagcgacggaccgtgtaattgccggacccgctaagaagagccgcgttatctccaagaaagaacgcaatatcgtggcttatcacgaaggcggacacaccgttatcggtctcgttttagatgaggcagatatggttcataaagtaacgattgttcctcggggccaggctggcggttatgctgttatgctcccaagagaagaccgttatttccaaacaaagccggagctgcttgataaaattgtcggcctcttgggcggacgtgttgctgaagagattatcttcggtgaagtcagcacaggggcgcacaatgacttccagcgtgcgacgaatattgcaagacgaatggttacggaattcggtatgtcagaaaaactgggaccgttgcaatttggacagtctcagggcggtcaggtattcttaggccgtgatttcaacaacgaacagaactacagtgatcaaatcgcttacgaaattgatcaggaaattcagcgcatcatcaaagaatgttatgagcgtgcgaaacaaatcctgactgaaaatcgtgacaagcttgaattgattgcccaaacgcttctgaaagttgaaacacttgacgctgaacaaatcaaacaccttgtcgatcatggaacattacctgagcgtaatttctcagaagatgaaaagaacgatgatgtgaaagtaaacattctgacaaaaacagaagaaaagaaagacgatacgaaagagtaattcgctttctttctaaataaactgccggctgacgctggcagtttttttatgtaaatgatgggctcagctgcggcttttacaatcatccaaatctggtatcgatttgtttacaaatgagccgctgatcgtgtatggtattgtagaatgtttgtaaaagtaaagtagagaaactattcaaaagtggtgatagaggttgttactggttatcgatgtggggaacaccaatactgtacttggtgtatatcatgatggaaaattagaatatcactggcgtatagaaacaagcaggcataaaacagaagatgagtttgggatgattttgcgctccttatttgatcactccgggcttatgtttgaacagatagatggcattattatttcgtcagtagtgccgccaatcatgtttgcgttagaaagaatgtgcacaaaatactttcatatcgagccgcaaattgttggtccaggtatgaaaaccggtttaaatataaaatatgacaatccgaaagaagtgggggcagacagaatcgtaaatgctgtcgctgcgatacacttatacggcaatccattaattgttgtcgatttcggaaccgccacaacgtactgctatattgatgaaaacaaacaatacatgggcggggcgattgcccctgggattacaatttcgacagaggcgctttactcgcgtgcagcaaagcttccgcgtatcgaaatcacccggcccgacaatattatcggaaaaaacactgttagcgcgatgcaatctgggattttatttggctatgtcggccaagtggaaggaatcgttaagcgaatgaaatggcaggcaaaacaggaaccaaaggtcattgcgacaggaggcctggcgccgctcattgcgaacgaatcagattgtatagacatcgttgatccattcttaaccctaaaagggctggaattgatttatgaaagaaaccgcgtaggaagtgtataggaggtttagtaatggattatttagtaaaagcacttgcgtatgacggaaaagttcgggcttatgcggcgagaacgactgatatggtaaatgaggggcagagacgccatggtacgtggccgacagcatccgctgcattgggccgcacaatgacagcttcacttatgctcggcgctatgctgaagggcgatgataagctgaccgtgaaaatcgagggcggaggtccaatcggagctattgtagctgatgccaatgccaaaggagaagtcagagcctatgtctctaacccgcaagttcattttgatttaaatgaacaaggaaagcttgatgtcagacgtgcggttggaacaaacggaacgttaagtgtcgtaaaagatttaggtttgcgcgagttcttcacaggacaagtagaaatcgtttcaggagaattaggagatgatttcacttactatcttgtatcatctgagcaggttccttcatcagtgggcgtaggtgtgctcgtgaatcctgacaataccattcttgcggcagggggctttattattcagctgatgccgggaacagatgatgaaacaatcacaaaaattgaacagcgtctatctcaagtagagccgatttctaagctcatccaaaaagggctgacaccagaagaaattttagaagaagtcctaggcgagaaacctgagattttggaaacgatgcctgtcagattccattgcccttgttcaaaagaacggttcgaaacagccattttaggactaggcaaaaaagaaattcaagatatgatagaagaagatggacaagccgaagcagtatgccatttttgtaatgaaaagtacttatttacaaaagaagagctggaagagcttcgtgaccaaactacccgctaagctctttagcgggtttttaatttgagaaaaggggctgaaagcaggtttgaaatcaagaacaatctggaccattattttaggggcgctgttggtttgctgtattgctgttgcatatacgctgacgaaatcccaagctggcgcatcgtcatccggtgagtctattgcgactatcggaggcaagagtgtgacaagagaagaatggctgaaagaaatggaagatcagtatggtaagtcaacgcttgaagatatgatcaatgtccgagttgttgagcagctggctaaaaagaacaaccttaaaatatccaaaagcgaagttgatcgtgagtttttgctgattaaagcggtcaataattccttttacgaagatgaacatacgacggagaaagagtggaaagaccaaattcgttataatatcctccttgaggaattgttaacaagggatatcgatatctcaaacaaagaattggaatcattctataataaaaataaggaactatatcagtttgatgattcgtatcgaattcggcacattgttgtaaaagatgaagaagaagcgagagaagtcctgaaagaactgaaaggcggatcaagctttgaagctgtcgctgccgaaagatctacagacagatatacatcaccatacggcggagatttaggttttgtcacagaggcatcagacaacattccatcagcatacattgaagaggcgaaaacactcaaagaggatgaatggtctcaggaaccaataaaggtcagcaacggatatgccattatccaactgaaagaaaaactaaaggcaagaacgttctcatttgatgaagtaaagggccagatcagacggcaaatcgcaatggatcagctaggtgataaagcgacagttaagacactttggaaagaagctgatgtatcttggttttatggggaaaaaagtactaagtgattgacaaaaaattttgaaattgatagattatatacataataccaatacaaatagtcggaaattgaggtgtcgagaatggtacgtgtagcaaactccattactgaattaattgggaatacgccaatcgttaaattaaatcgccttgcagatgaaaacagtgcggatgtatatctaaaacttgaatacatgaaccctggaagcagtgtaaaagaccgtatcggtttagccatgattgaagcggctgaaaaagaaggaaaattaaaagccggtgatacaatcattgaaccgacaagcggaaatactggaatcgggcttgcaatggttgctgctgctaaaggattaaaagccattttggttatgcctgatacaatgagcatggagcgccgcaaccttcttcgcgcatacggtgctgagcttgtgctgactcctggtgcggaaggcatgaaaggtgccattaagaaagctgaagagcttgctgaaaagcacggatactttgtgccgcagcagtttaacaacccttctaaccccgaaattcaccgccaaacaacgggtaaagaaatcgttgagcaattcggtgatgaccagcttgacgcatttgtagccggaatcggaacgggcggaacgattacgggagcgggcgaagtgctgaaggaagcatacccttccatcaagatttatgctgttgaaccgtcagattccccagtgctttcaggaggaaaaccaggcccccacaaaattcagggaatcggagcgggattcgtgccggacatcttaaacactgaagtatatgatgaaatcttccctgtgaagaatgaagaagcattcgaatatgcccgcagagctgcacgtgaagaaggaattctcggaggcatctcatcaggtgcggcaatttatgctgctcttcaagtagcaaaaaaactcggaaaaggcaaaaaagtattggccatcattccaagtaacggcgaacgttatctaagcacgccgctgtatcaattcgattaaaaaaagccaaaactcccggtccgccgggagtttttttatatttcgtgcatcaaatatgccatgtctgcgacgaatgttattcttggaagagaaattcacttttttcactaacaacattgctttacaattaaaaacaagtaaaaaagaaaatagaggaatgatacaaatggcacaacgcagaccggcaggcaaaaaaataccttttcaaaaagactcattcttacaacaatttgagaaacttgcgcaatcccggaaacatcatgtacttctcgaaagtgcaagaggcggcagatacagtatagccggtcttgatccaattgcgactgtgaaaggaaaagacggaataactacaattaagcatggtgatgagatgctgtttaaagaaggtgatccattacgggccttccacagctggtttaaaacgctggaaacagaaacaaatcatgagttccctgactttcaaggcggggcaatcgggtttctcagctatgattacgcacggtacattgaaaattttaaaatgctctcattagatgatctagaaacaccagatatttattttcttgtttttgatgatatagcagtttatgaccatcaagaagagtctctatggctgattactcatgttaatggttctgatcaggaaacagcgaatgtgaagctatctgagttagagcagatgtggctgactgagcttcccgctgtctcttcgcgagagatgaaccctgaaacagatggttctttcgcggcgccatttaccgaggatgggttctcgcaagctgtagagaaaatcaaacaatacattgccagcggagatgtgtttcaagtcaatctatcaataaggcagtcacagtcactgtctgcccacccatatcaaatttacaaaaccttgagagaagtaaatccttctccttatatggcgtatttagaaacacctgatttccaaatcatttgcggctcgcctgaactgcttgtcagcaaaaagggcaagctattagagacgagaccgattgcgggcacccgttccagagggaaaacaaatgaagaagacgaggtgcttgcaaacgaattgatacacaatgaaaaagaacgcgcggaacatgtcatgctggttgatcttgagcgaaatgatctgggaagagtatcacggtacgggtctgtgcgcgtaaatgaattcatggcaattgaaaaatactcgcatgtgatgcacattgtgtctaatgtccaaggtgaactgcaggatgggtatgatgctgtagatattattcatgctgtattccccggaggaaccattactggtgcaccgaaagtaagaacgatggaaattatagaagaacttgagccgacacgccgagggctttatactggatctataggatggtttggatataatcacgatctgcagtttaatatcgtcattcgaaccatttatgcaaccggagggcaggcatttatgcagtccggcgcaggagttgtgattgattctgttccgaagcacgaatacaaggaatcattcaaaaaagcttttgcgatgcaaagagcattagagctgagcaaagaagagacaaaaattagatgaggtgagcggagaaatgattttaatgattgataactacgattcattcacgtacaacttggtacagtatttgggcgagcttggggaagagctggttgtgaaacgcaatgacagcatcacaatcgaagaaattgaagaactgtctccggactttctgatgatatctcccggaccgtgcagccctgatgaggcgggaatcagcctcgaagcgattaaacatttcgcagggaaaattcctattttcggtgtatgtctcggacaccagtccatcgcacaagtgttcggtggtgacgttgttagggcagaacggcttatgcacgggaaaacctcggatatcgagcatgacggcaagaccatttttgaagggttgaaaaacccccttgttgcgacgcgataccactcgctgatcgtaaaacctgagacgctgccaagctgttttacagtaacagcacaaacgaaagaaggagaaatcatggctattcgccacaatgacctcccgatagagggcgtgcaatttcacccagagtctattatgacctcctttgggaaagaaatgctcagaaattttattgaaacatatcgcaaggaagttattgcgtgatgatatatgtgaacggccggtatatggaggagaaagatgcagttctttctccttttgaccatgggtttttatatgggatcggtgttttcgaaaccttcaggctctacgaaggctgtccgtttttgcttgattggcatatagaaaggcttgaacgcgcgcttaaggatctgcaaatcgaatatactgtttcaaagcatgagatccttgagatgctggacaagctgcttaagctaaatgatatcaaggatggcaatgcccgcgtcagactgaacatatcagcggggatcagcgataaaggctttgtcgcccagacgtatgataagccgaccgttttatgctttgtgaatcagctgaaaccagaaagccttcctttgcaaaaagaagggaaggttttatcgatacggagaaacactcctgagggatcgttccggttaaaatctcatcattatctaaataatatgtatgcgaaacgggaaattggaaatgatccacgtgtcgagggaattttcctaacggaggatggagctgttgcagagggtatcatatctaatgtcttctggagaaaaggtcgctgtatctatacgccatcgcttgatactggtattctggacggcgtcacgagacgttttatcatagaaaatgcaaagaatatcggcctggagctcaaaacgggccgatatgagccagaagctctcttgacagctgacgaagcgtggatgacgaactcggttcttgaaatcatcccgtttactaaaatagaagaagtaaactatggaagccaaagcggagaagcaacctccgctcttcaattgttatacaaaaaagaaataaagaacatgattcatgaaaagggaggaagagcatggcgcagcacacaatagatcaaacacaagtaatccacactaagcccagcgctttatcatataaagagaagacgctggtgatgggaattttaaacgtaacgcctgactctttctcggacggcggaaaatatgacagcttagacaaggcgctgctgcacgcggaagagatgatcaatgatggtgcccatatcattgatatcggaggggaatcgacaaggcctggcgctgagtgcgtatctgaggatgaggagatgtccagagtcattccggtgattgagcggattacgaaagagcttggtgttcctatttctgtagatacgtacaaggcttctgtcgcagatgaagcagtgaaagccggcgcatccattatcaatgatatttggggtgctaaacatgatccgaagatggcttccgttgcagctgaacataatgttccaattgttctcatgcataaccgccctgaaagaaactacaatgacttattgccggatatgctgtcggacttaatggagagtgtaaaaattgctgttgatgccggagtagacgagaagaacattattcttgatcccggtatcggtttcgcgaaaacctatcacgataacttggcagtgatgaacaaactagagattttcagcgggctggggtatccggttcttctggcaacctcccgaaaaagattcatcggacgtgttctggatcttccgcctgaggagcgggctgagggcacaggcgcgactgtgtgtctcggcattcaaaaaggctgtgacattgtcagggtccatgatgtaaagcaaattgccagaatggcgaaaatgatggacgcgatgctgaataagggaggggtgcaccatggataaagtttatgtagaaggtatggagttttacggatatcacggtgtgttcaaagaagaaaacaaacttggccagcggtttaaagtcgatttaaccgctgagctggatttaagcaaagctggacaaacagacgaccttgagcaaacgatcaactatgctgagctctatcacgtatgtaaagatatcgtggaaggggagcctgtaaaattggtagaaacgctggcggaacgtattgctggcactgttctcgaaaaatttcagcctgttcagcaatgtacggtgaaagtgattaagccagacccgccaattcccggacactataaatcagtagcaattgaaattacgagaaaaaagtcatgaacaacatagcttatattgcacttggatctaatattggagatagagaaacgtatttaaggcaagcagtggcttcactgcatcagcatgctgcggtgacagtcactaaagtgtcgtctatttacgaaactgacccggtcggatacgaagatcaagctcaatttttgaatatggctgttgaaatcaagacatcattgaacccttttgaactccttgaactgacgcagcagatagaaaatgaattaggcagaacaagggaagtaagatgggggccgcggacggcagaccttgacattttgttatttaatcgtgaaaatattgaaacagagcaactaattgttccgcatccgagaatgtatgagcgtttgtttgtccttgcgccgcttgcggaaatttgccagcaggttgaaaaagaggctacaagcgccgaaacagaccaagaaggtgtaagagtatggaagcagaaatctggggtagacgaattcgtgcattcagaaagctgaaaggttatactcaagaaggatttgcaaaagcattaggtatatcagtttctattctcggcgaaattgaacgcggaaaccgattgccgtcagctgccataattcaagatgcagcagatgttttaaatataagtgcggacgaattggcgccgccagaaaaatagaacaaatgaaaggaggagaaaaattgttcaaaatcggagatattcaattgaaaaaccgggttgtgctcgcacctatggctggtgtctgcaactctgcgttcagattgactgtaaaggaattcggagccggattggtatgcgctgaaatggtcagtgacaaagcgatcctttacaacaatgcaagaacaatgggtatgctttatatcgatgaacgtgagaaaccactcagccttcaaattttcggaggaaaaaaggaaacccttgtggaagcggcgaagtttgtagaccaaaacacaactgctgatatcattgacattaacatgggatgtcccgtgccgaagattacaaaatgcgatgcgggagccaaatggcttctcgatcctgataagatttacgaaatggtttctgcagtagtggatgctgttaataaaccagttacagtgaaaatgagaatgggctgggatgaagaccacattttcgcagtgaaaaatgcacaggctgtagaacgtgcgggtggtaaagcagttgcgcttcacggccgtacgagagtgcagatgtacgaaggaacggcaaactgggatatcatcaaagaagtaaaacaatcagtatcgattccggttatcggaaacggcgatgttaagacaccgcaggatgctaagcgtatgctcgatgagacaggagtagacggggtcatgatcggacgcgctgcattgggcaacccgtggatgatttaccgtacggttcagtatcttgaaacaggtgaattaaaagaagagccgcaagtacgcgaaaaaatggccgtatgcaaactgcatcttgaccgcctgattgacttaaaaggtgaaaacgtagcggtaagagaaatgagaaagcacgctgcatggtatctgaaaggcgtgaaaggcaatgcgaacgttcgtaatgaaatcaatcattgcgagacgagagaagagtttgtacagcttttagatgcatttacggttgaagttgaggcaaaagagcttcaaaatgcaaaagtaggataatactcacctctatttgctgctcactgctagttttacgctggcagtttttctgcttttttcatgaaacaatatctgtaatggagtgataacaatgagtcaagaagagcataaccatgaagaattgaatgatcagctgcaagtcagacgcgataaaatgaatcagctgagagataacggcatcgatccattcggcgcacgttttgaaagaactcatcagtctcaagaagttatttcggcatatcaagatctaaccaaagaagagttggaagaaaaagcgattgaagttacaatcgcaggccgcatgatgacaaaacgcggcaaaggaaaagccggctttgcccatcttcaggatttagaaggccaaatccaaatctacgtaagaaaagacagtgtcggtgacgaccaatatgaaatcttcaagtcttctgacctcggtgatcttatcggcgtaaccggaaaagtcttcaaaacaaatgtaggcgaattgtctgttaaagcaacttcctttgaattgctgacaaaagcgcttcgtccgcttcctgacaaataccatggtttaaaagacgttgagcagcgctaccgtcagcgctacctggatcttatcgtaaacccagacagcaaacatacgtttattacacgaagcaagatcattcaagctatgagaagataccttgatgatcatggatacttagaagtagaaacacctacaatgcacagcattcctgggggagcttctgcacgtccgtttatcactcaccacaacgcgttagacattccactctatatgcgtattgctatcgaactgcacctaaaacgtctaattgtcggcggtttagaaaaagtatatgaaatcggccgtgttttccgtaacgaaggtgtctctacacgccataaccctgaatttacaatgattgagttatatgaagcatatgcggactataaagatatcatgagcttaactgaaaaccttgtcgctcatatcgcccaagaagtgcttggcacaactacgattcaatacggggaagagcaaatcgaccttaaaccggagtggaaaagaatccatatggttgacgcagtcaaagaagcgaccggcgttgatttctgggaagaggttactgttgaacaggcgcgtgaatatgcaaaagaacatggagtagaaattaaagactctatgacagtaggccatatcatcaacgaattcttcgaacaaaaaattgaagaaacgcttattcagccaacgtttatttacgggcatcctgtagaaatttctcctcttgctaagaaaaaccctgaggacccgcgttttacagaccgttttgagctgtttatcgttggccgtgaacatgccaacgcgtttacagagctgaatgatcctattgatcaaagagaacgctttgaagcgcaattaaaagagcgtgaagccggtaatgatgaagctcatctaatggatgaagactttgttgaagctctggaatacggtatgccgccaacaggaggtttaggcatcggtatcgaccgtctggttatgctgctgacgaatgccccttctattcgcgatgtgctgttattcccgcaaatgagacaacgctaataaagaagagcggtatcctccatagagaaaggatgccgctctttttaaattccttagtatttcttcaaaaaaactattgcactattatttactaggtggtatattattattcgttgccgctaaacaaggcgataacgaaaaaataacttaaaaaaagttattgacttcactgagtcaacgagttataataataaagtcgcttgaacgaagtgaacaaaatgatctttgaaaactaaacaagacaaaacgtacctgttaattcagtttttaaaaatcgcacagcgatgtgcgtagtcagtcaaactactttatcggagagtttgatcctggctcaggacgaacgctggcggcgtgcctaatacatgcaagtcgagcggacagatgggagcttgctccctgatgttagcggcggacgggtgagtaacacgtgggtaacctgcctgtaagactgggataactccgggaaaccggggctaataccggatggttgtttgaaccgcatggttcaaacataaaaggtggcttcggctaccacttacagatggacccgcggcgcattagctagttggtgaggtaacggctcaccaaggcgacgatgcgtagccgacctgagagggtgatcggccacactgggactgagacacggcccagactcctacgggaggcagcagtagggaatcttccgcaatggacgaaagtctgacggagcaacgccgcgtgagtgatgaaggttttcggatcgtaaagctctgttgttagggaagaacaagtaccgttcgaatagggcggtaccttgacggtacctaaccagaaagccacggctaactacgtgccagcagccgcggtaatacgtaggtggcaagcgttgtccggaattattgggcgtaaagggctcgcaggcggtttcttaagtctgatgtgaaagcccccggctcaaccggggagggtcattggaaactggggaacttgagtgcagaagaggagagtggaattccacgtgtagcggtgaaatgcgtagagatgtggaggaacaccagtggcgaaggcgactctctggtctgtaactgacgctgaggagcgaaagcgtggggagcgaacaggattagataccctggtagtccacgccgtaaacgatgagtgctaagtgttagggggtttccgccccttagtgctgcagctaacgcattaagcactccgcctggggagtacggtcgcaagactgaaactcaaaggaattgacgggggcccgcacaagcggtggagcatgtggtttaattcgaagcaacgcgaagaaccttaccaggtcttgacatcctctgacaatcctagagataggacgtccccttcgggggcagagtgacaggtggtgcatggttgtcgtcagctcgtgtcgtgagatgttgggttaagtcccgcaacgagcgcaacccttgatcttagttgccagcattcagttgggcactctaaggtgactgccggtgacaaaccggaggaaggtggggatgacgtcaaatcatcatgccccttatgacctgggctacacacgtgctacaatggacagaacaaagggcagcgaaaccgcgaggttaagccaatcccacaaatctgttctcagttcggatcgcagtctgcaactcgactgcgtgaagctggaatcgctagtaatcgcggatcagcatgccgcggtgaatacgttcccgggccttgtacacaccgcccgtcacaccacgagagtttgtaacacccgaagtcggtgaggtaaccttttaggagccagccgccgaaggtgggacagatgattggggtgaagtcgtaacaaggtagccgtatcggaaggtgcggctggatcacctcctttctaaggatattatacggaatataagaccttgggtcttataaacagaacgttccctgtcttgtttagttttgaaggatcattccttcgaaacgtgttctttgaaaactagataacagtagacatcacattcaattagtaatacaagatatcacatagtgattctttttaacggttaagttagaaagggcgcacggtggatgccttggcactaggagccgatgaaggacgggacgaacaccgatatgcttcggggagctgtaagcaagctttgatccggagatttccgaatggggaaacccaccactcgtaatggagtggtatccatatctgaattcataggatatgagaaggcagacccggggaactgaaacatctaagtacccggaggaagagaaagcaaatgcgattccctgagtagcggcgagcgaaacgggattagcccaaaccaagaggcttgcctcttggggttgtaggacactctgtacggagttacaaaagaacgaggtagatgaagaggtctggaaaggcccgccataggaggtaacagccctgtagtcaaaacttcgttctctcctgagtggatcctgagtacggcggaacacgtgaaattccgtcggaatccgggaggaccatctcccaaggctaaatactccctagtgaccgatagtgaaccagtaccgtgagggaaaggtgaaaagcaccccggaaggggagtgaaagagatcctgaaaccgtgtgcctacaagtagtcagagcccgttaacgggtgatggcgtgccttttgtagaatgaaccggcgagttacgatcccgtgcaaggttaagcagaagatgcggagccgcagcgaaagcgagtctgaatagggcgcatgagtacgtggtcgtagacccgaaaccaggtgatctacccatgtccagggtgaagttcaggtaacactgaatggaggcccgaacccacgcacgttgaaaagtgcggggatgaggtgtgggtaggggtgaaatgccaatcgaacctggagatagctggttctctccgaaatagctttagggctagcctcaaggtaagagtcttggaggtagagcactgattggactaggggcccctaccgggttaccgaattcagtcaaactccgaatgccaatgacttatccttgggagtcagactgcgagtgataagatccgtagtcgaaagggaaacagcccagaccgccagctaaggtcccaaagtatacgttaagtggaaaaggatgtggagttgcttagacaaccaggatgttggcttagaagcagccaccatttaaagagtgcgtaatagctcactggtcgagtgactctgcgccgaaaatgtaccggggctaaacgtatcaccgaagctgcggactgttcttcgaacagtggtaggagagcgttctaagggctgtgaagccagaccggaaggactggtggagcgcttagaagtgagaatgccggtatgagtagcgaaagaggggtgagaatcccctccaccgaatgcctaaggtttcctgaggaaggctcgtccgctcagggttagtcgggacctaagccgaggccgaaaggcgtaggcgatggacaacaggttgatattcctgtaccacctcctcaccatttgagcaatggggggacgcaggaggatagggtaagcgcggtattggatatccgcgtccaagcagttaggctgggaaataggcaaatccgtttcccataaggctgagctgtgatggcgagcgaaatatagtagcgaagttcctgattccacactgccaagaaaagcctctagcgaggtgagaggtgcccgtaccgcaaaccgacacaggtaggcgaggagagaatcctaaggtgatcgagagaactctcgttaaggaactcggcaaaatgaccccgtaacttcgggagaaggggtgctctgttagggtgcaagcccgagagagccgcagtgaataggcccaggcgactgtttagcaaaaacacaggtctctgcgaagccgtaaggcgaagtataggggctgacgcctgcccggtgctggaaggttaagaggagcgcttagcgtaagcgaaggtgcgaattgaagccccagtaaacggcggccgtaactataacggtcctaaggtagcgaaattccttgtcgggtaagttccgacccgcacgaaaggcgcaacgatctgggcactgtctcaacgagagactcggtgaaattatagtacctgtgaagatgcaggttacccgcgacaggacggaaagaccccgtggagctttactgcagcctgatattgaatgttggtacagcttgtacaggataggtaggagccttggaaaccggagcgccagcttcggtggaggcatcggtgggatactaccctggctgtattgaccttctaacccgccgcccttatcgggcggggagacagtgtcaggtgggcagtttgactggggcggtcgcctcctaaaaggtaacggaggcgcccaaaggttccctcagaatggttggaaatcattcgcagagtgtaaaggcacaagggagcttgactgcgagacctacaagtcgagcagggacgaaagtcgggcttagtgatccggtggttccgcatggaagggccatcgctcaacggataaaagctaccccggggataacaggcttatctcccccaagagtccacatcgacggggaggtttggcacctcgatgtcggctcatcgcatcctggggctgtagtcggtcccaagggttgggctgttcgcccattaaagcggtacgcgagctgggttcagaacgtcgtgagacagttcggtccctatccgtcgcgggcgcaggaaatttgagaggagctgtccttagtacgagaggaccgggatggacgcaccgctggtgtaccagttgttctgccaagggcatcgctgggtagctatgtgcggacgggataagtgctgaaagcatctaagcatgaagcccccctcaagatgagatttcccattccgcaaggaagtaagatccctgaaagatgatcaggttgataggtctgaggtggaagtgtggcgacacatggagctgacagatactaatcgatcgaggacttaaccatatttttgaatgatgtcacatctgttatctagttttgagagaacactctcaatttgtttggtggcgatagcgaagaggtcacacccgttcccataccgaacacggaagttaagctcttcagcgccgatggtagtcggggggttccccctgtgagagtaggacgccgccaagcaattgcacgttagtgcaattatggaggattagctcagctgggagagcatctgccttacaagcagagggtcggcggttcgagcccgtcatcctccaccattatgccggtgtagctcaattggtagagcaactgacttgtaatcagtaggttgggggttcaagtcctcttgccggcaccacttttatatgatataatactcaagtctcttgtagaagagccattagctcagttggtagagcatctgacttttaatcagagggtcgaaggttcgagtccttcatggctcaccattttacgcgggtgtggcggaattggcagacgcgctagacttaggatctagtgtctttatgacgtgggggttcaagtcccttcacccgcattatataggataacagttagaaaaactggacatcctgtctgcggaagtagttcagtggtagaacaccaccttgccaaggtgggggtcgcgggttcgaatcccgtcttccgctccaactataccatccacgccggggtggtggaattggcagacacacaggacttaaaatcctgcggtaggtgactaccgtgccggttcaagtccggccctcggcattatgttttgcgcccgtagctcaattggatagagcgtttgactacggatcaaaaggttaggggttcgactcctctcgggcgcgccatattttttaatagaatagatgggaaatcgggaagtagctcagcttggtagagcacatggtttgggaccatggggtcgcaggttcgaatcctgtcttcccgaccattttttatggggccttagctcagctgggagagcgcctgctttgcacgcaggaggtcagcggttcgatcccgctaggctccaccaaaagttttttaaaaaagttgttgactttgaagaagtgacgttgtataatgataaagttgctttaacaaagcagacaaacaaaatgatctttgaaaactaaacaagacaaaacgtacctgttaattcagtttttaaaaatcgcacagtgatgtgcgtagtcagtcaaactactttatcggagagtttgatcctggctcaggacgaacgctggcggcgtgcctaatacatgcaagtcgagcggacagatgggagcttgctccctgatgttagcggcggacgggtgagtaacacgtgggtaacctgcctgtaagactgggataactccgggaaaccggggctaataccggatggttgtttgaaccgcatggttcaaacataaaaggtggcttcggctaccacttacagatggacccgcggcgcattagctagttggtgaggtaacggctcaccaaggcaacgatgcgtagccgacctgagagggtgatcggccacactgggactgagacacggcccagactcctacgggaggcagcagtagggaatcttccgcaatggacgaaagtctgacggagcaacgccgcgtgagtgatgaaggttttcggatcgtaaagctctgttgttagggaagaacaagtaccgttcgaatagggcggtaccttgacggtacctaaccagaaagccacggctaactacgtgccagcagccgcggtaatacgtaggtggcaagcgttgtccggaattattgggcgtaaagggctcgcaggcggtttcttaagtctgatgtgaaagcccccggctcaaccggggagggtcattggaaactggggaacttgagtgcagaagaggagagtggaattccacgtgtagcggtgaaatgcgtagagatgtggaggaacaccagtggcgaaggcgactctctggtctgtaactgacgctgaggagcgaaagcgtggggagcgaacaggattagataccctggtagtccacgccgtaaacgatgagtgctaagtgttagggggtttccgccccttagtgctgcagctaacgcattaagcactccgcctggggagtacggtcgcaagactgaaactcaaaggaattgacgggggcccgcacaagcggtggagcatgtggtttaattcgaagcaacgcgaagaaccttaccaggtcttgacatcctctgacaatcctagagataggacgtccccttcgggggcagagtgacaggtggtgcatggttgtcgtcagctcgtgtcgtgagatgttgggttaagtcccgcaacgagcgcaacccttgatcttagttgccagcattcagttgggcactctaaggtgactgccggtgacaaaccggaggaaggtggggatgacgtcaaatcatcatgccccttatgacctgggctacacacgtgctacaatggacagaacaaagggcagcgaaaccgcgaggttaagccaatcccacaaatctgttctcagttcggatcgcagtctgcaactcgactgcgtgaagctggaatcgctagtaatcgcggatcagcatgccgcggtgaatacgttcccgggccttgtacacaccgcccgtcacaccacgagagtttgtaacacccgaagtcggtgaggtaaccttttaggagccagccgccgaaggtgggacagatgattggggtgaagtcgtaacaaggtagccgtatcggaaggtgcggctggatcacctcctttctaaggatattatacggaatataagaccttgggtcttataaacagaacgttccctgtcttgtttagttttgaaggatcattccttcgaaacgtgttctttgaaaactagataacagtagacatcacattcaattagtaatacaagatatcacatagtgattctttttaacggttaagttagaaagggcgcacggtggatgccttggcactaggagccgatgaaggacgggacgaacaccgatatgcttcggggagctgtaagcaagctttgatccggagatttccgaatggggaaacccaccactcgtaatggagtggtatccatatctgaattcataggatatgagaaggcagacccggggaactgaaacatctaagtacccggaggaagagaaagcaaatgcgattccctgagtagcggcgagcgaaacgggattagcccaaaccaagaggcttgcctcttggggttgtaggacactctgtacggagttacaaaagaacgaggtagatgaagaggtctggaaaggcccgccataggaggtaacagccctgtagtcaaaacttcgttctctcctgagtggatcctgagtacggcggaacacgtgaaattccgtcggaatccgggaggaccatctcccaaggctaaatactccctagtgaccgatagtgaaccagtaccgtgagggaaaggtgaaaagcaccccggaaggggagtgaaagagatcctgaaaccgtgtgcctacaagtagtcagagcccgttaacgggtgatggcgtgccttttgtagaatgaaccggcgagttacgatcccgtgcaaggttaagcagaagatgcggagccgcagcgaaagcgagtctgaatagggcgcatgagtacgtggtcgtagacccgaaaccaggtgatctacccatgtccagggtgaagttcaggtaacactgaatggaggcccgaacccacgcacgttgaaaagtgcggggatgaggtgtgggtaggggtgaaatgccaatcgaacctggagatagctggttctctccgaaatagctttagggctagcctcaaggtaagagtcttggaggtagagcactgattggactaggggcccctaccgggttaccgaattcagtcaaactccgaatgccaatgacttatccttgggagtcagactgcgagtgataagatccgtagtcgaaagggaaacagcccagaccgccagctaaggtcccaaagtatacgttaagtggaaaaggatgtggagttgcttagacaaccaggatgttggcttagaagcagccaccatttaaagagtgcgtaatagctcactggtcgagtgactctgcgccgaaaatgtaccggggctaaacgtatcaccgaagctgcggactgttcttcgaacagtggtaggagagcgttctaagggctgtgaagccagaccggaaggactggtggagcgcttagaagtgagaatgccggtatgagtagcgaaagaggggtgagaatcccctccaccgaatgcctaaggtttcctgaggaaggctcgtccgctcagggttagtcgggacctaagccgaggccgaaaggcgtaggcgatggacaacaggttgatattcctgtaccacctcctcaccatttgagcaatggggggacgcaggaggatagggtaagcgcggtattggatatccgcgtccaagcagttaggctgggaaataggcaaatccgtttcccataaggctgagctgtgatggcgagcgaaatatagtagcgaagttcctgattccacactgccaagaaaagcctctagcgaggtgagaggtgcccgtaccgcaaaccgacacaggtaggcgaggagagaatcctaaggtgatcgagagaactctcgttaaggaactcggcaaaatgaccccgtaacttcgggagaaggggtgctctgttagggtgcaagcccgagagagccgcagtgaataggcccaggcgactgtttagcaaaaacacaggtctctgcgaagccgtaaggcgaagtataggggctgacgcctgcccggtgctggaaggttaagaggagcgcttagcgtaagcgaaggtgcgaattgaagccccagtaaacggcggccgtaactataacggtcctaaggtagcgaaattccttgtcgggtaagttccgacccgcacgaaaggcgcaacgatctgggcactgtctcaacgagagactcggtgaaattatagtacctgtgaagatgcaggttacccgcgacaggacggaaagaccccgtggagctttactgcagcctgatattgaatgttggtacagcttgtacaggataggtaggagccttggaaaccggagcgccagcttcggtggaggcatcggtgggatactaccctggctgtattgaccttctaacccgccgcccttatcgggcggggagacagtgtcaggtgggcagtttgactggggcggtcgcctcctaaaaggtaacggaggcgcccaaaggttccctcagaatggttggaaatcattcgcagagtgtaaaggcacaagggagcttgactgcgagacctacaagtcgagcagggacgaaagtcgggcttagtgatccggtggttccgcatggaagggccatcgctcaacggataaaagctaccccggggataacaggcttatctcccccaagagtccacatcgacggggaggtttggcacctcgatgtcggctcatcgcatcctggggctgtagtcggtcccaagggttgggctgttcgcccattaaagcggtacgcgagctgggttcagaacgtcgtgagacagttcggtccctatccgtcgcgggcgcaggaaatttgagaggagctgtccttagtacgagaggaccgggatggacgcaccgctggtgtaccagttgttctgccaagggcatcgctgggtagctatgtgcggacgggataagtgctgaaagcatctaagcatgaagcccccctcaagatgagatttcccattccgcaaggaagtaagatccctgaaagatgatcaggttgataggtctgaggtggaagtgtggcgacacatggagctgacagatactaatcgatcgaggacttaaccatatttttgaatgatgtcacatctgttatctagttttgagagaacactctcaatttgtttggtggcgatagcgaagaggtcacacccgttcccataccgaacacggaagttaagctcttcagcgccgatggtagtcgggggtttccccctgtgagagtaggacgccgccaagcaagcttaaacccagctcaatgagctgggttttttgtattttggtttattggtatcataaaattccacttaactgtataatataataactttataccgaattttaaatcagcaatcaggttttgtggaccgggaaaatggaaataatgaaggatagagcgagaaagttgaaaattctcgagaaacggcttatagtaagattaaagtcaaatatagtcaaagtcagtaaaggagggggttgagtgggacataatatttctgacatcattgaacaatatttaaaacgagtgttagatcaaaatggcaaggaaattttagagattaaacgaagtgaaattgcagataaatttcaatgcgttccttcccaaataaattatgtcatcaacaccagatttacaagcgaaagaggatatattgttgagagcaaacgcgggggtggcggttatatcagaatcattaaaattaaaatgaacaatgaagttgtcctgatcaataatattatttctcaaattaatacccatttgtctcaagcagcctctgatgacattattttaaggctattagaagacaaggtaatttcagaaagagaagcaaaaatgatggtcagcgtaatggaccgctcagttttacacattgacttgcctgaacgtgatgaattaagagcgagaatgatgaaggcaatgctgacttctttaaaattaaaataagcgggtgaaaagattgatttgtcaagagtgccacgagagaccagccacttttcactttacaaaggttgttaacggagaaaaaatagaagttcatatttgtgaacaatgtgccaaagaaaatagtgattcatatggtataagtgcaaatcagggtttctctattcataatttactttcgggtttactgaacatggattcttcatttcaaaatgcaggaactcaaatgttcagtcactcggagcaaatatctgcttgtccgaaatgcggaatgacttttcagcaattcagaaaaattggccgttttggatgttctgaatgttacaaaacatttcatagcaacattacacctatcctacgtaaagtgcacagcggaaacactttgcatgcagggaagataccgaaacgaataggcggcaatcttcatgtcagacggcagattgatatgctaaaaaaggaattagaatccttaatccatcaagaagaatttgaaaatgcagctcatgtaagagatcaaattcgttcattagaacaatcactcaaaagtacagatagtgaggaggaacaggagtaatgtcgctaaagcattttattcaggacgcactaagcagttggatgaagcagaaaggacctgaaagtgacattgtactcagcagccgcatacgtttagcaaggaactttgagcatattcggttccctacgcggtattccaatgaagaagcctcatccatcatacagcaatttgaagatcagttttcagagcaagaaattcccggaatcggcaaatttgttttgattagaatgaatgatgcacagcctttagaaaagcgtgtacttgttgaaaaacatctaatcagtcctaatctgacagagtctccttttggcggctgtttgctttctgaaaatgaggaagtaagtgtcatgttaaatgaagaggaccatattagaattcagtgtcttttccctggatttcagcttttagaagcaatgaaagccgcaaaccaggtcgacgactggattgaagaaaaagttgattatgcattcaatgagcaaagaggatacttaaccagctgtcctacaaacgtaggtacaggtttaagggcttcggtcatgatgcatctgccggcactggttttaactaggcaaataaatcgaattataccggcaattaatcaattaggcttagttgttagaggaatttatggggaaggcagcgaagcagtagggaatatctttcaaatttcaaatcagatcacgcttggtaagtcagagcaggatattgtagaggatcttaacagtgttgctgctcagttgattgaacaagaacgatctgcccgagaagcgatttatcaaacttctaaaatcgaacttgaggatcgggtatatcggtcttatggggtcttgtctaattgccggatgatagaatcgaaagaaactgcaaagtgcctttcagatgttcggttaggcatagacctaggcattataaaaggactttcaagcaacatacttaacgaacttatgattttgacgcagccaggatttttacagcaatactcgggaggcgctttgcgtccgaacgaaagggacattcgaagagcggctctcatcagagaacggcttcacttagaaatgaatgggaaacgacaggaggatgaatcgatatgatgtttggaagatttacagaacgagctcaaaaagtactggcgctagcacaggaagaagcacttcggttaggtcataataacattggcactgagcatattttattaggactggtaagagaaggagagggcattgctgctaaagctcttcaagcgcttggactcggttcagataaaattcagaaagaagtagaaagtttgatcgggcgcgggcaggaaatgtctcaaacgattcattatactcctagagctaaaaaagtcattgagctttcaatggatgaggcaagaaaactcggtcattcttatgttggaacagaacatattcttcttggactgattcgtgaaggagaaggtgttgctgcgagagttttgaataatctcggtgtcagcttaaataaagcaagacagcaggtgctccagcttctaggaagtaatgaaacaggatcatcagcggcaggaacaaacagcaatgcgaatacgcctacgcttgacagcttggcaagagacttaactgctattgcgaaggaagacagccttgaccctgtaatcggcagaagcaaggagatccagcgtgtcattgaagtattaagccgcagaacgaaaaacaaccctgttctcattggggaaccaggtgtaggtaaaacggctatcgcagaaggtttggcacagcaaattatcaataatgaagtacccgaaattttgcgtgataaacgtgtgatgacattagacatgggaacagttgttgccggcacaaaatatcgcggagaatttgaggatcgcctgaagaaggtcatggatgaaattcgccaggcaggaaatatcattctattcatcgatgagctccatacattaatcggggcaggcggagcagaaggtgctattgatgcatctaatattttaaaaccttcacttgctcgcggcgaactccaatgtattggtgcaacgactcttgatgagtaccgtaaatatattgaaaaagatgcagcactggaacgccgttttcagccgattcaggttgatcagccatctgtagatgaaagtattcaaattttacaaggtctgcgtgacagatacgaagcccaccaccgcgtttctatcactgatgatgccattgaagctgcggttaagctttctgacagatatatttctgaccgcttccttccggataaagcaattgacttgatcgatgaagcaggttcaaaggtgagactgcgctcatttacaacgcctcctaacttaaaagagcttgagcagaagcttgatgaggttcgtaaagagaaggatgcggcagtgcaaagccaagagtttgaaaaagctgcttccttgcgtgatactgaacaacgcctgcgcgagcaagtagaggatacgaagaaatcatggaaagagaagcaagggcaggaaaactcagaggttactgtggatgatattgcgatggttgtatccagctggaccggtgtgcctgtatctaaaatcgcccaaactgaaactgataagcttctcaatatggaaaacattcttcattcccgcgtcatcggccaggatgaggcagttgtagctgttgcaaaagccgtcagacgtgcgagagcagggttgaaagatcctaaacgcccaatcggctcattcattttcttaggccctacaggtgtaggtaaaacagaacttgcacgagcacttgctgaatccatttttggcgatgaagaatccatgatcagaattgacatgtctgaatacatggaaaaacactcaacttcaagacttgttggttcacctccgggatatgtgggatatgatgaaggcggtcaattgacagagaaagtcagaagaaaaccttactctgtcgtgcttcttgatgagatcgagaaagcgcaccctgatgtcttcaatatccttctgcaagttcttgaagacgggcgattgactgattctaaaggacgcacagtcgatttccgcaataccattctgatcatgacatcaaacgtcggagcaagtgagctgaaacgcaataaatatgtcggctttaacgttcaggatgaaactcaaaatcataaagacatgaaagataaagtgatgggtgaattgaaacgagcgttcagacctgagttcatcaaccgtattgatgaaatcattgtcttccattcacttgagaaaaaacatcttactgaaattgtgtcattaatgtctgatcaattaacgaaacgcctgaaagaacaagatctttctatcgaattgacagatgctgcaaaagcgaaagtcgcggaagagggcgttgacctggaatacggtgcccgtccgttaagaagagcgatccaaaaacatgtcgaggatcgtttatctgaagaactcctcagaggaaatattcataaaggacagcatattgttcttgatgtagaagatggcgaatttgtcgtaaaaacgactgctaaaacgaattaatatagaagacggaaatgaggcatacagcatgtaagtgtatgcctcactttcatatcaagaaatagaacaagggagaggtcttacactatatatggctaaaacaaaatcgaaattcatctgccaatcctgcggctacgagtctccaaaatggatggggaaatgtccgggctgcggtgcttggaatacaatggtggaagaaatgattaaaaaagcaccggccaatcggagagcggctttttctcattctgttcaaactgtacagaaaccttcacctattacatcaatcgaaacatcagaagaaccccgcgtcaaaacccagcttggcgagtttaacagagtactcggcggaggtgtcgttaaaggctccctcgttttaattggcggtgatcctggtatcggaaagtcaacgctattactgcaggtttccgctcaattatcaggctcatcaaacagtgtcctgtatatttcgggagaagaatctgtaaagcaaacgaagctgcgagcagaccgtctcggcattaataatccgtcactgcatgttttatctgaaaccgatatggagtatatttcgtctgctatacaagagatgaatccagcgtttgtcgttgttgactctattcaaacggtttaccaaagcgatattacatcggctccaggcagtgtgtcacaggtcagagaatgtaccgctgagctgatgaaaattgcaaaaacaaaaggtattccgatttttatcgtagggcacgtaacgaaagaagggtctattgcaggtccaagactgttggagcatatggttgacactgttttatattttgaaggagaacgccaccatactttccgtattttgcgggctgtaaaaaaccgtttcggatctacaaacgaaatgggcattttcgaaatgcgggaagaggggctcactgaggttttgaatccttcggaaattttcttagaagaacgctctgctggttccgcaggctcgagtatcactgcctctatggagggcactagaccgattctcgttgaaattcaggcgctcatctcgccaacaagctttggcaacccaaggcgtatggcaacgggaatagaccataacagggtctctctgttaatggctgtgttagaaaaaagagttggactgctgctgcaaaatcaggatgcttatttgaaagtggctggcggcgttaagcttgatgaaccggcaattgatcttgccattgcgattagtatcgcatcaagctttagagacacacctccaaatcctgcagattgttttattggagaagtgggattaaccggagaagtccggcgggtttcaagaattgaacagcgtgtgaaagaagcggcaaagcttggttttaaacgcatgatcatacccgcggcaaatctggatggatggacaaaaccaaaagggattgaggttatcggagtagcaaatattgcagaagcgcttcgtacttcattaggaggataatagatggaaaaagagaaaaaaggggcgaaacacgagttagacctgtcatctatattgcagtttgttgctccgggtacaccgctcagagcggggatggaaaacgtcttgagagcaaatacaggcggtctgattgttgttggatataatgataaagtaaaagaagtggtggacggcggctttcacataaacacggctttttctccggcgcatttatatgagctggctaaaatggatggagcgatcattttaagtgattctggtcaaaagatcctctacgcgaatactcagctgatgccggatgccacaatttcttcatcagaaacaggaatgcggcacagaactgccgaaagagtagctaagcaaactggctgtcttgtaatcgctatttctgaaagaagaaatgtcataacgttatatcaggaaaacatgaagtatacactaaaagacataggatttattttaaccaaggcgaaccaagccattcaaacacttgaaaaatataagacaatcctcgataaaacgattaatgcactgaacgcgttagagtttgaggaacttgttaccttcagtgatgtcttgtctgtcatgcatcgttatgaaatggtactgagaatcaaaaacgaaattaatatgtatatcaaagagctggggacagaagggcatctgatcaaactgcaagtcattgaattgattacggatatggaagaagaggccgctttatttattaaggactatgtaaaagaaaagattaaagatccgtttgttctcttgaaggagctgcaggatatgtccagttatgatctgctggatgattccattgtgtataagcttctcggttaccctgcttctactaatcttgatgattatgtattgccgagaggatacaggctgttaaataagataccgcgtcttccgatgccgattgttgaaaatgttgtagaagcatttggagtcctgccaaggattattgaggcgagtgcagaagaattagatgaagtagagggaatcggtgaagtacgagcccaaaaaatcaaaaaaggattaaaacgcctgcaagagaagcattatttagacagacaactgtgatttcggttaaaaccttatgaatacgggtatattaatgttggtttttgtttattctgatattcgtaggatgcataagactttgtgaaattaaaatgttaaaaaaggaggtgggggtatgttaaaacgaatagttcaggcgttcttcattatttttggcggcgttgttggtatatttttgatacctgaattgtttgtactgttaaatatacaggacatacctttaataacaaacgcatatacgtctgcggcaataggagcaattatcttttttctcatcagtatatggggtacagaatacgttgtgaactgggtgaagtggatagaggattcattgttaaaagcgccggttccagatttgttatttggaagtcttggcttagtttttggacttataattgcttatcttatcgtaaatgttattcctttagacaatataccttaccgcatattcagcacaataattcctgtatttttggctttcttcctcggttatctcggcttccaggtgggctttaagaaaaaggatgaattgatcagcctgttttccatttccgccagaatgcaaaagaaaaaaggaacagctgatgaagaacatgaggttcaagacaagaagctgaaaattttggacactagtgttattattgatgggagaatagcagatatttgtcagactggttttttagagggagttatcgtgattccgcagtttgtccttgaggaattgcagcatattgcagactcttcagatgttttaaaacgaaacagaggacgccgcggtcttgatatcctgaaccgcattcagaaagaattagacattgaagttgaaatttacgaaggcgactttgaagatattcaggaggttgacagcaagctcgtcaaacttgctaagctgacatccggggtcgttgtgacgaatgattttaatttaaataaagtgtgcgagcttcagaaggtagcagtattaaacattaatgaccttgccaatgcggtcaagcctgttgtgcttcctggcgaggaaatgaatgttcaggtcattaaggacgggaaagagcataatcagggagttgcctacttggatgacggtacgatgattgtcgttgaagaaggacgaaattatatcggcaagcatattgatgtactcgtcacaagtgtgctgcagacagcagcgggacgaatgatttttgcgaagcctaagctgttggagaaggcgctgtaaagggagaagaaacaatgagttatgatgtggtgattcctgcagccggacagggaaagcggatgaaggcagggagaaataaactgttcattgatctgaagggagacccggtgatcatacacacgttaagagtgtttgacagccaccggcagtgcgataaaatcattttggtgattaacgagcaggagcgggagcactttcaacacttgctgtccgattacccgttccaaacttcaattgagcttgttgcaggcggagaagagcgtcagcacagtgtgtataaggggctgaaagccgtaaagcaggaaaagattgtccttgtacatgacggtgcccgcccatttataaaacatgaacaaattgacgaactgatcgcagaggcggaacagacaggagcggccatccttgctgttccggtaaaagatacgattaaacgcgttcaagatttacaagtcagtgagacgattgaacgttcaagcttgtgggctgtccaaacgccacaagcttttcgtctttctttattgatgaaggctcacgctgaggccgagcgcaagggatttttagggacggatgacgccagcctcgttgaacagatggagggcggttcggtccgtgttgtagaaggcagctatacaaatattaagctgacgacgccagacgatttgacgtcagctgaagctatcatggaatcagaaagtgggaataaacatgtttagaattggacaaggatttgatgtgcatcaattagtggagggccgtcctctcattattggcggaattgaaatcccgtacgaaaaagggctgcttggccattctgatgcagacgtattgctgcatactgtcgctgacgcctgcctgggagctgtgggtgaaggagacatcggcaagcattttcctgacacagatcccgagttcaaggacgcagattctttcaaattacttcagcatgtctggggaatcgtgaaacagaaggggtatgtccttgggaacattgattgcaccatcatagcgcaaaagccgaagatgctgccgtacatagaagatatgagaaaaagaattgctgaaggccttgaggcagaagtttctcaagtaaatgtaaaagcaacaacgacagaaaagcttggatttacaggccgggcggaaggaatagcggctcaggcgacagtactgatacaaaaaggctaacttgttttgatgccgggtctatttggtggtagaatagattcatacatttttgcctgaggccatacatgacatgaaaggaagtatttgaaaatgggaaacgaagtacgcgtccgttatgcaccgagtccaaccggacatttgcatattggaaatgccagaacggcgctttttaattatttatttgcccgcaatcaaggcggtaagtttatcattcgagttgaggatacagataaaaagcgcaatattgagggcggagaacaaagccagctgaattatctgaagtggctaggtattgactgggatgagagtgtggatgtcggaggagagtacggcccataccgtcagtcagagcgtaacgatatctataaagtgtactatgaagagcttcttgaaaaagggcttgcttataaatgttactgtacggaagaagagcttgaaaaagagcgtgaagaacagattgcccgcggagaaatgcctcgttattccggaaaacacagagacctgactcaggaagaacaggagaaatttatcgctgaaggcagaaaaccaagtattcgtttccgcgtgccggaaggaaaaatcatcgccttcaatgatatcgtaaaaggcgaaatttcttttgaatcagatggcatcggcgactttgttattgtgaaaaaggacggtacgccgacttacaacttcgcggtagcgattgatgactacttaatgaaaatgacacacgtgctgcgcggtgaggatcatatttctaacacaccgaaacagattatgatttatcaagcattcggatgggatattcctcagttcggacacatgacgctgatcgtaaacgaaagccgtaaaaagctcagtaaacgtgatgaatccattattcaattcatcgagcagtacaaagagcttggctacctgccagaagcactgttcaactttatcggcctgttaggctggtcaccggttggagaagaagagcttttcacaaaagagcagtttattgaaatttttgatgtaaatcgtttatctaaatcaccagctttgtttgatatgcataagctaaaatgggttaacaaccaatatgtgaagaagctggatcttgatcaggttgttgaattgacgcttccgcatttgcaaaaagccggcaaagttggcactgagctttctgctgaagaacaagaatgggttcgtaaactgatttccctgtatcatgagcaattaagctacggtgcggaaattgttgagctgactgatttgttctttacggatgagatcgagtataatcaagaagcgaaagctgttctggaagaagaacaggttcctgaagtgctcagtacattcgcagcgaagcttgaagagcttgaggagttcactccggataacatcaaagcatcgatcaaagcagtgcagaaagaaactggccataaagggaaaaaactgtttatgccgattcgtgttgctgtaacagggcaaactcatggtccggaactgccgcaatcaattgaattgatcggtaaagagactgcaattcagcgtttaaagaatatctaaataaatgattgttgacagggaagagtataaagctttaggccattacagaaaggatctccattggctgagagagatccatgagccgggttttagaagtgcgcccttaagacctttgaagaacgttttttgaaatcagtattcaaaggcggccgccgccgttacaggctgaagttgggagagcagaagtctgcttttcaaacagagtggaaccgcgcggttaaagcgtctctgtcatgtttacatgcagaggcgctttttttattgggtagaggaaatcagatagagaaacggggggaagcatgtgttttttagaatgctcaaagaagacattgatactgtgttcgatcaagatcccgcagcaagaagctattttgaagtgattttaacttattccggtttacatgctatatgggcgcatcggattgcacatgctttatataaacgaaaattttatttccttgcacgccttatatctcaagtaagccgattttttaccgggatagaaatccaccccggcgccacaatcgggagaagatttttcatagaccacggcatgggggttgtcattggggagacatgtgaaatcgggaataacgttaccgtttttcagggggttaccctcgggggaacggggaaagaaaagggaaaaaggcacccaacgattaaagatgacgcattgatagccacaggtgctaaagtgctcggttctattacggtcggtgaaggctcaaagattggggctggttcagtagtgctgcatgatgttcctgatttttcaacagttgtcggtatccctggacgggtcgttgtacaaaatggcaagaaagtaagacgcgatttaaaccatcaggatttgcccgatccggttgctgaccgctttaagtctttggaacagcagattttagagctgaaggcagaacttgaagacagaaaagaaaggatcaaccaaaaatgacaatcacactttataatacattgactagacagaaggaaacattcgttcctcttgaagagggaaaagtgaaaatgtatgtatgcggacccacggtttacaattacattcatatcgggaacgcgcgtccggcaatcgtttacgatacggttcgaaactatttagagtataaaggctatgatgtgcagtatgtctctaacttcacagacgtagacgataaactaattaaagcggcaaatgaactcggtgaggatgtacccaccatttcagagcgttttattaaagcatactttgaagacgtaggtgcgctcggctgccgaaaagccgaccttcatccgcgagtaatggagaacatggatgccattatcgaattcgtagatcagctcgtgaaaaagggctacgcatatgaatcagaaggtgacgtatatttcaaaaccagagcgtttgaagggtacggaaagctttctcagcaatcaatcgatgaacttagatcaggtgcacgcatccgagtcggcgagaaaaaagaagatgctcttgatttcgcactgtggaaagcggcaaaagaaggagaaatctcttgggatagcccttgggggaaaggacgtccgggctggcacattgaatgctcagcaatggtgaaaaagtatctcggtgaccagattgatatccatgcgggcggacaggatttaacattccctcaccatgaaaacgaaattgcgcaatctgaggcgctaacaggcaaaacgtttgcgaagtattggcttcataatggttatatcaatattgataatgaaaaaatgtcaaaatcactaggcaactttgtgcttgtgcatgacatcattaaacagcatgatccgcagcttttgagattctttatgctatctgttcattatcgccatccgattaactattcagaagagcttctggagaatacgaaaagcgcgttcaaccgtttaaaaacagcgtacagcaatcttcagcaccgtctgaacagcagtacgaatttaaccgaagatgacgatcaatggcttgaaaaagttgaagaacaccgcaaagcattcgaagaagcgatggacgatgattttaatacggcgaatgccatttcagtcttgtttgacttagcgaaacacgccaattattatcttcagaaagatcatacggctgatcatgtgattacggcgtttattgagatgtttgaccgcattgtttctgtcctcggtttttcgttgggtgagcaggaacttctcgatcaagagattgaagacttaatcgaaaagcgaaatgaagcgcgccggaatcgcgattttgcattgtcagaccagatccgcgaccagctgaaaagcatgaatatcattcttgaagatacggctcaaggcactcgctggaaacggggagaataacagatgcttgaatttgatacgataaaagattctaagcagcttaacggtcttgcgcttgcttatataggtgatgccatttttgaagtgtatgtcaggcatcacctgcttaagcagggctttaccaaaccaaatgatcttcataagaaatcaagccggattgtttcagcaaagtcacaggctgagatcctattttttctgcagaatcaatcattttttacggaagaagaggaagcggtgctgaaaagaggcagaaatgccaagtcagggacaacacctaaaaatacagatgttcagacgtaccgctacagtacagcatttgaagcgcttctgggctacctttttctagagaaaaaagaggaacgacttagtcagctcgtagccgaagctatacaattcgggacgtcagggaggaaaacaaatgagtcagcaacatgattacgtcatagggaaaaatgcagtgatcgagacgttaaaatctgatcggaagctgtataagctgtggatggcggaaaacaccgtaaagggacaagcacagcaagtgattgagcttgccaaaaagcagggaatcacgattcaatacgtcccgagaaaaaaactcgatcaaatggtgacaggacagcatcagggcgtagtggcacaggttgcagcgtatgaatatgcagaactggacgatttatataaagcagccgaagaaaaaaatgaacagcctttcttcctcattctggacgagcttgaagaccctcataatcttggttccattatgaggacagcagatgcggtcggcgctcatggcatcgtcattccaaaacggagagctgtcgggctgacaacaacagtggcaaaagcttcaacaggagcaattgagcacattcctgtagcaagagtcaccaatttggcacggacgttagaagagatgaaagagcggggaatctgggttgtcggaacggatgcgtccgcgcgtgaggattaccgtaatatggacggcaatatgcctttggctctagtcatcggaagtgaaggaaaagggatgggccgccttgtgaaagaaaagtgcgattttctcattaaactcccgatggccggaaaggtaacttcactaaatgcatctgtcgcggctggtcttttgatgtatgaagtctaccggaaacgaaaccctctgggagaataaagacccatggatatcctgttagtagacgggtacaacatgattggagcctggccgcagctgaaggatttaaaagcgaacagttttgaagaggcgagagacgtactgattcagaaaatggcggaatatcaatcgtatacaggaaacagggttattgttgtttttgacgcgcatctcgtaaaagggcttgagaaaaaacagaccaaccatagagttgaagtaatttttacaaaagaaaatgagacggctgatgagcggatagaaaagctcgctcaggctttgaataatattgcgactcaaattcacgttgcgacctctgactatactgagcagtgggcgattttcggacagggggcattgcggaaatcggcccgggagcttttgagagaggtagaaacgattgaaaggcgaatagagagacgggtaagaaaaatcacttccgaaaagccggcgggtaaaattgctttatcggaagaggttttgaaaacgtttgaaaagtggaggcggggagacttagattaagttgacgcttttttgcccaatactgtataatatttctatctacgtgcgccggggggatcggagtgaatctacagaacaacaagggaaaattcaacaaagagcagttttgccagttggaggacgagcaggtcattgaaaaggttcatgttggggacagtgatgcgttagattacttgattacgaagtaccgaaactttgttcgggcaaaagcaagatcctatttcttaataggggcggacagagaggatattgttcaggaaggcatgataggcctctataagtctattcgtgacttcaaagaggacaagcttacctcattcaaagctttcgcagaattatgtattacccgccaaattattaccgcaataaagacagctactcgccagaaacacattcctttgaattcctacgtctcattagataaaccgatttttgatgaagaatcagaccgaacgctgctggatgtcatttcaggagcgaaaaccttaaatcctgaggaaatgatcattaatcaggaagaatttgatgatattgaaatgaaaatgggagaactattaagtgatttagagagaaaagtactcgtcttatatctcgacgggagaagttaccaagagatttctgatgaactgaaccgacatgtgaaatcgatcgacaatgcccttcagcgtgtgaaacgcaagctggagaagtacttggaaattcgcgaaatcagtttgtaataggaatttatgctatattgacagtatttttctgactatgatatgttactaaagataagaactaatgtctatttagaaaaaggtgtaatgacatgagaaaaaagattacgttagcatgcaagacatgcggaaaccgtaattatacgacaatgaagagctctgcatcagcggctgagcgattagaagtaaagaaatactgcagtacttgcaattcacatacagctcatcttgaaacaaaatagtttttgcgcttttaaattgtggaggtcttttacatgcgtattatgaaattctttaaagatgttgggaaagaaatgaaaaaggtaagctggcctaaaggaaaagagttaacgcgttataccattacggtaatttcaacagttatcttttttgttatcttttttgccctccttgacacaggaatttctcaattaattcgtttaatagttgaataatgatcagcaatacgtgctataatagatcataatattacttgccaaaacccgttcagcgggttttttattgtggcttaaaatgaaagttatcataggcttgccgcctattttttgaagcgttatggtaattcactaaaaccaaatgcggggagggaaggactggacagtcctgaatagaatggaaaagaattggtatgttgttcacacgtactctggttatgagaataaagtaaaagccaacttggaaaagcgtgttgaatcaatggggatgcaggataaaattttccgtgtagtcgtacccgaagaagaagaaacggatatcaaaaacggcaagaaaaaagtcgtgaaaaagaaagtattccctggttatgtgcttgttgaaattgtaatgacagacgactcttggtatgtcgtccgcaacacgccgggcgttactggattcgtaggatctgccgggtcaggttcaaaaccgacgccgcttcttccgggggaagcagaaaccattctgaagagaatgggcatggatgaacgaaaaactgatattgactttgaactgaaagagacagtgaaagtgatagacggaccttttgctaactttacaggatcaattgaagagattgattatgataaaagcaaggtcaaagttttcgttaatatgtttggccgtgaaacgccggttgagctggaatttacccaaatcgataaattgtaatgtgaaaaaacttgaaattgctatatataaatgataatatagcaaaggtacgtcttggacttatccaaggcaactagcatgatatttcgtcattcatataaagaatgaaaccttgagtgggagggtttaccctattaccacatcacggacttaaggaggtgtgtctcgtggctaaaaaagtagttaaagttgtaaaattgcaaattcctgctggaaaagctaacccagcaccaccagttggacctgcacttggtcaagccggtgttaacatcatgggattctgtaaggagtttaacgctcgtacagctgaccaagctggtttaatcattcctgttgaaatttcggtttacgaagaccgttcatttacatttattacaaaaactccacctgctgcagtattgcttaaaaaagcagctggaattgagtctggttctggtgaaccaaaccgtaataaagtggcaaccgttaagcgcgataaagtacgcgaaatcgctgaaacgaaaatgcctgacttaaacgcagcagacgttgaagcggcaatgcgcatggttgaaggtactgcccgcagtatgggtattgtaatcgaggattaatttgtttcttgtcgggttgcgagttttaacaagttcgcaacccttattcgtgggaggttattccgctataaccacataaggaggaaattttaaaatggctaaaaaaggtaaaaagtacgttgaagctgctaagcttgtagaccgttctaaagcttacgacgtctctgaagcagtagctctcgttaaaaaaacaaacacagctaaattcgacgctacagttgaagtggctttccgtttaggggttgaccctcgtaaaaacgaccagcaaatccgtggagcagttgtgcttccaaacggaactggtaaaactcagcgcgttctcgttttcgcaaaaggcgaaaaagcgaaagaagctgaagctgctggtgcagatttcgtaggcgatactgactacatcaacaaaattcaacaaggctggttcgatttcgatgtaatcgtagctacacctgacatgatgggtgaagttggtaaaatcggtcgtgtacttggaccaaaaggtttaatgccaaaccctaaaactggtacagttactttcgaagttgaaaaagctatcggcgaaatcaaagctggtaaagttgaataccgcgttgataaagctggaaacattcatgttcctatcggtaaagtttctttcgaggatgaaaaacttgttgagaacttcacaacaatgtacgatacaatccttaaagctaaacctgctgcagctaaaggcgtttacgtgaaaaacgttgctgtaacttctactatgggacctggtgtcaaagtagactcttcaacttttaacgtaaaataatattgacatgacatcaacattctgatattattcaaaatgttgtaaaatagaatatcatttataccgtagacagtaggggcctaaccgcttaattatcctaccgaggtgtatattatcacagctattacgttacgtatgcttgtatatacagcctccatgtctcatggaggctttttatatggaatccgtcgtctcagtcgtgatcacctaacggtataagtgttacacaagaatctacaggaggtgtaaccatgagcagcgcaattgaaacaaaaaaagttgttgttgaagaaattgcttctaaactgaaagaaagtaaatcaacgatcatcgttgactatcgcggacttaacgtttctgaagtaactgaacttcgtaaacagcttcgcgaagctaacgttgagttcaaagtttacaaaaatacgatgactcgccgtgcggttgaacaagctgagcttaatggtttgaatgatttcttaactggaccgaacgcgatcgcattcagcactgaagatgttgtcgctccggctaaagttcttaatgacttcgctaaaaatcacgaagctcttgaaatcaaagctggcgttatcgaaggtaaagtttctactgttgaagaagtgaaagctcttgctgaacttccatcacgcgaaggcttgctttctatgttgcttagcgtacttcaagctccagttcgcaaccttgctcttgctgcaaaagctgtggcagaacaaaaggaagaacaaggcgcttaatctaatcagtttttcataaattaaaacaaaatggaggaattacaaatggctttaaatatcgaagaaatcattgcttccgttaaagaagcaactgtacttgaattgaacgacctagtaaaagcaatcgaagaagaatttggcgtaactgctgctgctcctgtagctgtagctggcggagctgctgctggcggagctgctgaagagcaaagcgaattcgatcttatccttgctggtgcaggatctcaaaaaatcaaagttatcaaagttgtacgtgaaatcactggtcttggcttgaaagaagctaaagaacttgttgacaacactccaaaaccacttaaagaaggtattgctaaagaagaagctgaagagcttaaagctaaacttgaagaagttggcgcttctgtagaagttaagtaatcttcacttacctgtaggggaagctcgcttttatgaggcgagctttttctttgccattctttaagccatgaaaaaaggaggttctaataatgagtgagcactattattcagaaaaaccttcagtaaaaagcaacaagcaaacctggtcttttaggcttcggaataaagatttcacgtttaccagcgacagcggggttttttctaaaaaagaagttgatttcggctcccgcctgctgattgattcttttgaagagcctgaggttgagggcagctttttggatgtaggctgcgggtacggcccgattggtttatcgctggccagcgactttaaagaccggactatccacatgattgacgttaatgagagagccgtagaactatcaaatgaaaatgcggaacataacggaataacaaacgttaagatttatcaaagtgatttgttttcaaacgttgattctgctcaaacatttgcttctattcttacaaatcccccaatccgagccggaaaaaaagttgtccatgctatctttgagaaaagcgctgaacacttaaaagcttcaggtgaattgtggatcgtcatacagaaaaagcaaggcgcgccttctgccattgaaaagctcgaggaactgttcgatgaagtttccgtcgttcaaaaaaagaaaggctattatatcataaaagcaaaaaaagtttgactcggtattttaactatgttaatattgtaaaatgccaatgtatatattttgcttgatatgatgaattgtcaatatctatgtataaattatacaagtatggaaatgctaataaaatcggtatttgtttttggatgtggttttcttaattagaaacccttttttcttttgtcttgtaaaagtattttctttctttggaagaaatgcttattacacatataatacgcatgatttgaggggtgaatcagttgacaggtcaactagttcagtatggacgacaccgccagcgcagaagctatgctcgcattagcgaagtgttagaattaccaaatctcattgaaattcaaacctcttcttatcagtggtttcttgatgagggtcttagagagatgtttcaagacatatcaccaattgaggatttcactggtaacctctctcttgagttcattgattatagtttaggtgagcctaaatatcctgtagaggaatcaaaagaacgtgatgtgacttactcagctccgctaagagtgaaggttcgtttaattaacaaagaaactggagaggtaaaagaccaagatgtcttcatgggtgatttccctattatgacagatacaggtacttttatcattaacggtgcggaacgtgttatcgtttcccagcttgttcggtctccaagtgtatatttcagtggtaaagtagacaaaaacggtaaaaaaggttttaccgcaactgtcattccaaaccgtggcgcatggttagaatacgaaactgatgcgaaagatgttgtttatgtccgcattgatcgcacacgtaagttgccggttacggttcttttgcgtgctctcggcttcggctccgatcaagagattcttgatctcataggagaaaacgaatacctgcgaaatacgcttgataaagataacacagaaaacagcgacaaagcgttgctggaaatttacgagcgtctccgtcctggagagccgcctacagtagaaaatgcgaaaagcttgcttgattctcgtttctttgatccgaaacgatacgatcttgccaatgtaggacgctataaaattaataaaaaacttcatattaagaatcgcctcttcaatcagagacttgctgaaacgcttgttgatcctgaaacaggagaaatccttgctgaaaaaggccagattcttgatagaagaacgcttgataaagtactgccatacttagaaaacggaatcggttttagaaagctgtatccgaatggcggcgttgttgaagatgaagtgactcttcaatcaattaaaatctttgctccgactgatcaagaaggagaacaggttatcaatgtaatcggcaatgcttacatcgaagaagagattaaaaacatcacgcctgctgatattatttcttcaatcagctacttcttcaacctgctgcacggagtaggcgacacagatgatatcgatcatcttggaaaccgccgtttacgttctgtaggcgagcttctccagaaccaattccgtatcggtttaagccgtatggagcgtgtggttcgtgagagaatgtcaattcaagatacgaatacaattacgcctcagcagctgatcaatattcgtcctgttattgcgtccattaaagagttctttggaagctcacagctttctcaattcatggatcagacgaacccgcttgctgaattaacgcacaagcgtcgtctgtcagcattaggaccgggcggattgacacgtgagcgtgccggaatggaagtgcgtgacgttcactactcccactatggccgtatgtgtccgattgaaacgcctgagggcccgaacatcggtttgatcaactcactatcatcttatgcaaaagtaaaccgttttggctttattgaaacgccatatcgccgcgttgaccctgaaacagggaaggtaacgggcagaatcgattacttaactgctgatgaagaggataactatgttgtcgctcaagcgaatgctcgtcttgatgacgaaggcgcctttattgatgacagcatcgtagctcgtttccgcggggagaacaccgttgtttccagaaatcgtgtagactacatggatgtatcgcctaagcaggttgtatctgctgcgacagcatgtatcccgttcttagaaaacgatgactccaaccgtgccctcatgggagcgaacatgcagcgtcaggctgtgcctttgatgcagccggaagcgccatttgttggaactggtatggaatacgtatcaggaaaagactctggtgccgctgttatttgtaaacaccctggtatcgttgaacgcgtagaagccaaaaacgtttgggttcgccgttatgaagaagtagacggtcaaaaagtaaaaggaaacctggataaatacagcctgctgaaatttgtccgctctaaccaaggtacgtgctacaaccagcgtccgatcgtaagtgtcggcgatgaagtggtaaaaggagaaatccttgctgacggtccttctatggagcttggtgaacttgcacttggccgtaacgtaatggtcggcttcatgacgtgggatggctacaactatgaggatgccatcatcatgagtgaacgcctagtgaaggatgatgtttatacatctatccacattgaagaatacgaatcagaagcacgtgatacgaaacttggacctgaagaaatcactcgcgatattccaaacgtcggtgaagatgcgcttcgcaatcttgatgaccgcggaatcatccgtattggggcagaagtaaaagacggagatcttcttgttggtaaagtaacgcctaaaggcgtaactgaactgactgccgaagaacgccttcttcacgccatctttggcgagaaagcccgcgaggttcgtgatacttctcttcgtgtgcctcatggcggcggcggaattatccatgacgttaaagtcttcaaccgtgaagacggagacgaacttcctccaggtgttaaccagttagtacgcgtatatatcgttcagaaacgtaagatttctgaaggggataaaatggccggtcgtcacggtaacaaaggtgttatctctaagattcttcctgaagaggatatgccttaccttcctgacggcacaccaattgatatcatgcttaacccgctgggcgtaccatcacgtatgaacatcgggcaggtattggaacttcacatgggtatggccgctcgttaccttggcattcacattgcatctcctgtatttgacggagcgcgagaagaggatgtctgggaaacacttgaagaagccggcatgtctcgtgacgccaaaacagtgctttacgacggacgtactggagagccgtttgataaccgtgtatctgtcggtatcatgtacatgatcaaactggctcacatggttgacgataaacttcatgcacgctctacaggtccttactcacttgttacgcagcagcctcttggcggtaaagcgcaatttggcggacagcgttttggtgagatggaggtttgggcacttgaagcttacggtgcggcttatactcttcaagaaattctgactgttaagtctgatgacgtggttggacgtgtgaaaacatacgaagccatcgttaaaggcgacaatgttcctgaaccaggtgttccggaatcattcaaagtattaatcaaagaacttcaaagcttaggtatggatgtcaaaatcctttctggtgatgaagaagaaatagaaatgagagatttagaagacgaagaagatgcgaaacaagctgacggcctggcattatcaggtgatgaagagccggaagaaacagcatctgcagacgttgaacgcgatgtagtaacaaaagaataatctctagttataaaggcaagtgacatcggttaatccgaagataaaaagggaggtaggccccttgctagatgtgaacaattttgagtatatgaacatcggtcttgcttcaccagataaaatccgttcatggtcttttggtgaagtgaaaaagcctgaaacgataaactatcgtacgttaaaacctgaaaaggacggtctattctgcgaacgcattttcggaccgactaaggactgggaatgtcattgcgggaagtacaagcgagttcgttataaaggcgtagtttgtgaccgctgcggagtcgaagtaacacgggctaaagtccgtcgtgagagaatggggcacattgaactggctgccccagtttcccacatttggtatttcaaaggtattccaagccgtatgggtcttgtgctggatatgtcacctcgtgctttagaagaagtcatttactttgcttcttacgttgtaactgatccggcgaatacaccgcttgaaaagaaacagcttctgtctgagaaagaatatcgtgcttatcttgataaatacggtaataaattccaagcatctatgggtgctgaagcaattcataaacttcttcaagatattgatcttgtaaaagaagttgatatgttaaaagaagagctgaaaacttcacaaggacaacgccgtactcgtgcgatcaaacgtcttgaagttttagaagccttccgtaactcaggaaacaagccttcttggatgatccttgatgtgcttcctgttattcctccggagcttagaccgatggttcagctagatggcggtcgttttgcgacttctgatttgaatgacctttatcgtcgtgtcatcaaccgtaacaatcgtttgaaacgccttttggaccttggtgcgcctagcatcatcgttcaaaacgaaaagcgtatgcttcaagaggctgtcgatgccctaattgacaacggccgccgcggacgccctgtaacaggtcctggtaacagaccgttaaaatctctttctcacatgctgaaagggaagcaaggccgtttccgtcaaaaccttcttggtaaacgtgttgattactccggacgttctgtaatcgttgttggtcctcatttgaaaatgtaccaatgcggattaccgaaggaaatggcgcttgaacttttcaaacctttcgttatgaaagaacttgttgaaaaaggtcttgctcacaacattaagagtgcgaaacgcaaaattgagcgcgtacagcctgaagtttgggatgtactagaatcagttattaaggagcatccggtactgctgaaccgtgcccctacacttcacagattaggtatccaggcgtttgaaccaacgcttgttgaaggacgcgcaatccgtcttcacccgctcgtatgtacagcttacaacgctgactttgacggtgaccaaatggcggttcacgtaccattatctgctgaagcacaagctgaagcacgcatcttgatgcttgctgctcaaaacatcttgaaccctaaagatggtaaaccggttgtaacaccgtctcaggatatggtactaggtaactattacctgacacttgagcgtgccggtgctgtcggtgaaggtatggtcttcaagaatacagacgaagcgcttcttgcttatcaaaacggatatgttcaccttcatacgagagtagctgttgcagctaactcacttaagaatgtgacatttaccgaagaacagcgctcaaaattgttaattacaactgtcggtaagcttgtcttcaatgaaattcttccggaatcattcccttacatgaatgaaccaacgaagagcaacattgaagagaaaacaccagaccgtttcttcttagaaaaaggtgctgatgttaaagctgttatcgcacagcagccaatcaatgcgccgtttaaaaaaggcattctgggtaaaatcatcgcggaaatctttaaacgattccatattacggaaacgtctaaaatgcttgaccgcatgaaaaacctaggtttcaaatattcaactaaagctggtattacagttggggtttctgacatcgtcgtactcgatgataaacaagaaattcttgaggaagcgcaaagcaaagttgacaacgttatgaagcaattccgccgcggtcttatcactgaagaagaacgctatgagagagtcatctctatctggagtgctgcaaaagacgttatccaaggcaaactgatgaaatcacttgatgaactcaacccgatctacatgatgagtgactctggtgcccgtggtaacgcatctaactttacgcagcttgccggaatgcgcggcctgatggccaacccggctggacgtatcattgagttgccgatcaaatcaagtttccgtgaaggtctgacagtattggagtactttatctccacacacggtgcgcgtaaaggtcttgccgataccgctcttaaaactgctgactcaggttaccttacacgccgtctcgttgacgttgctcaggatgttatcatccgtgaaactgattgcggaactgaccgaggcattcttgctaagcctcttaaagaaggaactgaaacaattgagcgcttagaagaacgcttaatcggacgttttgcaagaaaacaagtgaagcaccctgaaacaggtgaagtgcttgtgaatgaaaacgaactgatcgatgaagataaagcactggagattgtcgaagccggcattgaagaagtgtggatccgttctgccttcacatgtaatacgcctcatggtgtatgtaaacgatgctatggccgaaatcttgcaactggctccgatgttgaagtcggtgaagctgtcggaatcattgctgcccaatcaatcggtgagcctggtacacagttaacaatgcgtacattccatacaggcggggttgccggagatgacatcacacagggtcttccgcgtatccaagagcttttcgaagcgcgtaatccgaaaggtcaggcaacaattacagaaatcgacggtacagtcgttgagatcaatgaagttcgtgataagcaacaggaaattgtggttcaaggcgcagtggaaacacgttcttatacggcaccttacaactcccgcctgaaagtagcggaaggagataaaattactcgaggccaagtactgacagaaggttcaatcgatccgaaagaacttcttaaagtgactgacctgacgactgttcaagagtatcttctccatgaggttcaaaaggtttaccgtatgcagggtgttgaaatcggtgataaacacgtagaagtaatggttcgccagatgcttcgtaaagtacgcgtgattgatgccggtgacactgatgtgcttccaggtacattgcttgatattcaccaatttactgaagcgaacaaaaaggtattgcttgaaggcaatcgacctgctacaggccgtcctgtcttactcggtattacaaaagcatctcttgaaactgattcattcttatctgctgcttccttccaggaaacaacacgtgtccttacagatgcagcgatcaaaggtaagcgtgacgagcttctcggcttgaaagagaatgttatcatcggtaagcttgttccagctggtacaggaatgatgaaataccgtaaagtaaaaccagtatcaaatgttcagccgactgacgatatggtcccggttgaataactgatttaactctgctgaaagactgcaaaaacagtctttcagcagatatatttatgaaaaagtcactctatgagaagaacgaatctaaaaaatgtcataccttgttgacattcgtctcctagaatgataatataaccaaggtgctcgaaataaacctgttactttggaggatatgtttatgtcttatgataaagtatcacaggccaaatcaattattattggtacgaagcaaacagtgaaagctctaaagcgaggttcagtaaaggaagtagtcgttgcaaaagacgcagatccgatactcacgtcaagtgttgtttcacttgctgaagatcaaggtatctctgtctcaatggttgaatccatgaaaaagctcggcaaagcctgcggaattgaggtaggagcagccgctgttgccattattttataacgtacttttgtttttgcgtaagattccatcttgtgtaaagacattgttttttgccttttgatgaaccacctgggtatgtgggttataaaacgtaatgaagggaggaaaaattcatgcctacaattaatcagctaattcgcaaaggacgcgtgagtaaagtagaaaactcaaagtctcctgcacttaacaaaggatacaacagctttaaaaaagagcacactaacgtatcttctccacaaaaacgcggggtatgtactcgtgttggtacaatgacaccgaaaaaaccgaactcagcacttcgtaaatatgctcgtgttcgtttgactaacggaatcgaggttactgcttacattcctggtatcggtcacaacctacaagagcacagtgttgtacttatccgcggcggacgtgtaaaagacttaccaggggtacgttaccacatcgttcgtggtgcgcttgatactgctggagttgaaaaccgtgcacaaggccgttctaaatacggtacgaaaaaacctaaagcaaaataatatacgaaaatacgcataattgatgaagggaggatattcagatgccacgtaaaggtcctgtagcaaaaagagatgttttacctgatccgatttacaactctaagcttgtatctcgtttaatcaacaaaatgatgatcgatggtaaaaaaggtaagtctcaaacaatcctatacaagtcattcgatatcattaaagaacgtactggcaatgatgcaatggaggttttcgaacaagcattgaaaaacatcatgcctgtacttgaagtaaaagcacgccgtgtaggtggtgcgaactaccaagttcctgtagaagttcgtcctgaacgtcgtacgactcttggacttcgctggttagttaactacgctcgtcttcgcggagaaaaaacgatggaagagcgtttagctaacgaaatccttgacgcagctaacaacactggtgctgctgttaagaaacgtgaagacactcataagatggctgaagcaaacaaagcatttgctcactatcgctggtaggatttatagattaacaaaacacaatttcctaataaggaaggagaaattacccaatggcaagagagttctccttagaaaaaactcgtaatatcggtatcatggctcacatcgatgccggtaaaacgactactacagaacgtatcttgttctatactggtcgtatccacaaaattggtgaaactcatgaaggagcttcacaaatggactggatggagcaggaacaagaacgtggtatcacaatcacttccgctgcgacaactgcacagtggaaaggataccgcgtaaacatcatcgatactccaggacacgtagacttcacagttgaagttgaacgttctcttcgtgtacttgatggtgctgttgctgtacttgacgcgcaatcaggcgttgagcctcaaacagaaactgtttggcgtcaggcaacaacttatggagtaccgcgtatcgtttttgttaacaaaatggacaaaatcggtgcagacttcctttactctgtaggaactttaagagaccgtcttcaagcaaacgctcatgcaattcaattgccgatcggtgctgaagataacttcgaaggtatcattgaccttgtagaaaacgttgcgtatttctacgaagatgacctcggaactcgttctgatgcaaaagaaatccctgaagagtacaaagagcaagccgaagagcttcgcaacagccttattgaagctgtatgtgagcttgatgaagagcttatggataagtaccttgagggtgaagaaatcacaattgacgagttaaaagcaggaattcgtaaaggtacattaaatgttgaattctaccctgttcttgttggttctgccttcaaaaacaaaggtgttcaactagtacttgatgctgttcttgactaccttcctgcaccaactgacgttgctgcaatcaaaggtacacgtcctgatacaaatgaagagattgagcgtcattcttctgacgaagagccattctctgcattagcatttaaagttatgactgacccttacgttggtaagttgacgttcttccgtgtgtactctggaacacttgattctggttcatacgtgaaaaactctactaaaggcaaacgtgagcgtgttggacgtattcttcaaatgcacgctaacagccgtgaagaaatctctactgtatacgcaggggatatcgcagctgctgtaggtctaaaagatacaactactggagatactctatgtgatgagaaggatcttgttatccttgagtcaatggaattcccagaaccagttatcgacgttgctattgagcctaaatcaaaagctgaccaagataaaatgggtatcgctttagcgaaacttgctgaagaagatcctacattccgtactcaaacaaacccagaaactggccaaacgatcatctctggtatgggtgaacttcaccttgatatcattgttgaccgtatgaaacgcgaatttaaagtagaagccaatgttggtgctcctcaagttgcgtaccgtgaaacattccgtaccggtgctaaagttgaaggtaaattcgtacgtcagtctggtggacgcggtcagttcggacacgtttggatcgaattcgaaccaaacgaagaaggcgctggctttgaatttgaaaatgcgattgtcggtggggttgttcctcgtgaatacatcccagctgttcaagcaggtctggaagatgcacttgaaaatggtgtactagcaggcttcccgcttatcgacattaaagctaaacttttcgacggttcttaccatgatgttgactcaaacgaaatggcatttaaagttgctgcttctatggcattgaaaaatgcagtcagcaaatgtaacccagttcttcttgaaccaatcatgaaagtagaagtggttattccagaagaatacatgggagatatcatgggtgatattacttcacgtcgcggacgcgtagaaggtatggaagcacgcggtaacgctcaagttgttcgcgctatggttcctcttgctgaaatgttcggttacgctactgcacttcgttctaatacgcaaggtcgcggtacgttcactatgcacatggatcactacgaagaagtgccgaagagcgtcgcagaagaaattatcaaaaaaaataaaggcgaataattgattttgccgcttaactcaagtataactactattgtaagatgaggaagtgaaagctttctttcacttcctatcactctatacattactaattaaaagctcttaaggaggattttagaatggctaaagaaaaattcgaccgttccaaatcacatgccaatattggtacaattggacacgttgaccatggtaaaacaactttaactgctgctatcacaacagtacttcataagaaatctggtaaaggtacagctatggcgtacgatcaaattgatggtgctccagaagaacgcgagcgcggtatcacaatctctactgcacacgttgagtacgaaactgaaactcgtcactatgcacacgttgactgcccaggacacgctgactatgttaaaaacatgatcactggtgctgcgcaaatggacggagctatccttgtagtatctgctgctgatggcccaatgccacaaactcgtgagcacatccttctttctaaaaacgttggtgtaccatacatcgttgtattcttaaacaaatgcgacatggtagacgacgaagagcttcttgaactagttgaaatggaagttcgcgatcttcttagcgaatacgacttccctggtgatgatgtaccagttgttaaaggttctgctcttaaagctcttgaaggagacgctgagtgggaagctaaaatcttcgaacttatggatgcggttgatgagtacatcccaactccagaacgcgacactgaaaaaccattcatgatgccagttgaggacgtattctcaatcactggtcgtggtacagttgctactggccgtgtagaacgcggacaagttaaagtcggtgacgaagttgaaatcatcggtcttcaagaagagaacaagaaaacaactgttacaggtgttgaaatgttccgtaagcttcttgattacgctgaagctggtgacaacattggtgcccttcttcgcggtgtatctcgtgaagaaatccaacgtggtcaagtacttgctaaaccaggtacaatcactccacacagcaaattcaaagctgaagtttacgttctttctaaagaagagggtggacgtcatactccattcttctctaactaccgtcctcagttctacttccgtacaactgacgtaactggtatcatccatcttccagaaggcgtagaaatggttatgcctggagataacactgaaatgaacgttgaacttatttctacaatcgctatcgaagaaggaactcgtttctctattcgtgaaggcggacgtactgttggttcaggcgttgtttctacaatcactgagtaatagtatgattttaaacgagacccctgcgggtctcgttttttgtttgcttatctttttcttgtataataggatctatcatattcgaggggttaatatttatgattcctgaaaagaaatcaatcgcaatcatgaaagaactaagcattggaaatacaaagcaaatgctgatgattaatggagttgacgtggaaaatccattgttgctttttttacatggcgggccgggaacgccgcaaatcggatatgttagacattatcaaaaagagctggaactgtattttacagtagttcattgggatcagagaggatcggggctttcttattctaagcgaatttcgcatcactctatgacaataaatcacttcattaaagatacaatccaagtcactcaatggcttttagctcatttttcaaaatcaaaactttacctagccggtcattcttgggggtcaatactggcgcttcatgttttgcagcagtgtcctgatttattttacgcgtattatggaatcagccaggttgttaaccctcatgatgaagaatcaactgcttatcaacatattcgtgaaatttctgaatcaaaaaatgccagcttattatctttcctcacacgtttcattggtgctccgccttggaagcaggatatccagcaccttatctatcggttttgtgtcgagctaagcaggggaggcttcactcgccgtcatcgtcaatctctagctgtattatttcaaatgcttactggcaatgagtatggagtgcggaacatgcacagcttcctcaatggattgcgcttcagtaaaaaacatttaactggtgagttgtaccggtttaatgcttttacatcagttccttctattaaagtaccgtgtgttttcatttcagggaaacatgacttaattgttcctgctgaaatatcgaaacagtattatcaagagcttgaggcacccgaaaagcgctggtttcaatttgagaactcagctcacaccccgcatattgaggagccggcattattcgcgaacacattaagtcgacatgcacgacaccatttatgatagatccttgataaataagaaaaacccctgtataataaaaaaagtgtgcaaaccatgcatattttaaataagtcttgcaacatgcgcctattttctgtataatggtgtatgttggtctttgactgcgatgaagtgagaggttgctgacacacccggccgctttgccatggcaaggtgttcaggtttttctcacggagaactgtctaacgtgatgtaggcgaaaaggagggaaaataatggcaaaacaaaaaattcgtattcgtttgaaagcatatgatcatagaatccttgatcaatctgcagagaagattgttgaaacggcaaaacgttctggtgccagcgtatctggtccgattccgttgccaactgaaaaatcagtttacacaatccttcgtgcggtgcacaaatacaaagattctcgtgagcaatttgaaatgcgtacacataaacgtttaatcgacattgtgaacccaacaccacaaactgttgatgctcttatgcgattagacttaccatctggtgtcgatatcgaaattaaactttaattctaaaatatagaatgatcttaataggaggtgtgacgaatgaccaaaggaatcttaggaagaaaaattggtatgacgcaagtattcgctgagaatggtgatcttattccggtaactgttatcgaggctgctccaaacgttgttcttcaaaagaaaacagctgaaaacgacggttacgaagcaatccagcttggttttgacgacaagcgtgaaaagctttctaacaaacctgaaaaagggcacgttgcaaaagcggaaactgctcctaagcgcttcgttaaagaattacgcggagtggaaatggatgcgtatgaagttggtcaggaagtcaaggttgaaattttctctgctggagaaatcgtagatgtaacaggagtatctaaaggtaaaggtttccaaggtgcgatcaagcgccacggacaatctcgcggacctatgtctcacggttcacgctaccaccgtcgtcctggttcaatgggacctgtagatcctaaccgtgtattcaaaggtaaattattacctggacgtatgggcggagagcaaatcactgttcaaaaccttgaaatcgtaaaagttgatgcagaacgcaatcttcttttgatcaaaggtaacgtacctggtgcgaagaaatctttaatcactgttaaaagtgctgttaaatctaaataattctcttaggaaaggaggaaattgattatgccaaaagtagcattatacaaccaaaacggttctactgctggtgacatcgaattaaacgcttctgtatttggtatcgaaccaaatgagagtgttgtattcgacgctattcttatgcaaagagcttccttacgtcaaggaactcacaaagtaaaaaatcgttctgaagtacgcggcggaggtcgtaaaccatggcgtcaaaaaggtactggacgtgcccgtcaaggttcaatccgttcaccgcaatggcgcggaggtggtgtcgtattcggcccaacaccacgcagctattcttataaattacctaaaaaagttcgccgcttggcaatcaaatcagtattgtcttctaaagtgatcgacaacaacatcatcgttcttgaagatcttactcttgatacggctaaaacaaaagaaatggcagctatccttaaaggattatctgttgagaaaaaagctttaatcgtaactgcggatgcaaacgaagcagtagctttatctgctcgtaacattcctggagttactgttgttgaagctaacggaatcaacgttttagacgttgtcaaccacgagaagcttctgattacaaaagcagcggttgaaaaagtagaggaggtgcttgcataatgaaagatcctcgtgatgttctaaagcgccccgtcattactgaacgttctgctgatttaatgactgaaaagaaatatacttttgaagttgatgtaagagctaacaaaacagaagtgaaagacgcggttgaaagcatctttggagtgaaagttgacaaagtcaacatcatgaactacaaaggtaaatcaaaacgtgttggacgctacactggtatgactagccgtcgcagaaaagcgatcgtaaaacttactgcagacagcaaagaaatcgaaatttttgaagcttaattatctgtaaaaagaaggagggaaattcaaaatggcgattaaaaagtataaaccgacctctaatggacgtcgtggcatgacaacttcagattttgctgaaatcacgactgacaagccggaaaaatccttgcttgctccccttcacaaaaaaggcggacgtaacaaccaaggtaaattgactgtacgtcaccaaggtggcggacataaacgccaataccgtgttatcgacttcaaacgcgataaagatggtatacctggacgcgttgctacagttgaatacgatccaaaccgttcagctaacatcgctctaatcaactatgcagacggagaaaaacgttacattcttgctcctaaaggaattcaagtaggtactgaaatcatgtcaggtcctgaagctgacattaaagtaggtaatgcacttccacttatcaacatccctgttggtacagttgtgcataacattgaattaaaacctggtaaaggcggacagcttgtacgttcagctggtacatctgctcaggttcttggtaaagaaggtaaatacgttcttgtacgtcttaactctggtgaagttcgcatgatcctttctgcttgccgtgcttctatcggtcaagtaggtaacgaacagcacgaacttatcaacattggtaaagctggacgttctcgctggaaaggcatccgtcctacagttcgtggttctgtaatgaaccctaacgatcacccacacggtggtggtgaaggacgtgcgccaatcggacgtaaatcaccaatgtctccatggggcaaacctactcttggattcaagactcgtaagaaaaagaacaaatccgataaatttatcgtacgtcgtcgtaaaaataaataacggggttgtctacggttcttttcggaccgtagtgcaatcacgaagggaggttccaaaatggctcgcagcttaaaaaaaggaccatttgtcgatggacacttgatgactaaaatcgagaaattaaatgaaacagacaagaaacaagtcgtaaaaacttggtctcgtcgttctactattttcccacagtttattggtcacacaatcgcagtctatgacggacgtaaacacgtgcctgtattcatctctgaagatatggtagggcacaagttgggtgaattcgctccaactcgtacgtacaaaggtcatgctagtgatgacaaaaaaacaagacgctaagagaggaggcttttaaatgcaagctaaagctgttgcaagaacagtccgtattgctcctcgtaaagcacgtctagtaatggacctgattcgaggcaagcaagtaggtgaggcagtatcaatcttgaaccttacaccaagagctgcttctccaattatcgagaaagtattaaaatccgctattgcaaatgctgagcataactatgaaatggacgctaacaacctggttatttctcaagcattcgttgacgaaggccctacgttaaaaagattccgcccacgtgctatgggacgtgcgagccaaatcaacaaacgtacgagccacattacaatcgttgtatcagaaaagaaggagggataagtagtgggtcaaaaggtaaatccagtcggtcttcgtatcggagtcattcgtgattgggaatctaagtggtacgctggtaaagattacgctgacttcctgcacgaagatttaaaaattcgtgaatacattagcaaacgcctttctgacgcttctgtttctaaagtagaaatcgagcgtgcagcaaaccgcgttaacattacgatccacacagctaagcctggtatggttatcggtaaaggcggttctgaagtcgaagcacttcgcaaagcccttaacagccttactggcaagcgtgtacacattaacattcttgaaatcaaaagagcagatcttgatgcacagctagttgctgacaacatcgctcgtcaattagaaaaccgtgtttctttccgccgtgcgcagaaacaacaaatccaacgtactatgcgtgctggagcacaaggtgtgaaaacaatggtttctggtcgtcttggcggtgcagatatcgctcgttctgaatactacagtgaaggaactgttccattgcacacattacgtgcggacattgactatgcaacatctgaagctgatactacttacggtaagcttggtgtaaaagtctggatctatcgtggagaggttcttcctactaagaagaaaactgaggaaggaggaaaataatatgttattaccaaaacgcgttaaatatcgcagagagcatcgcggaaaaatgcgtggccgtgcgaaaggcggtactgaagtacatttcggagaattcggtatccaagctcttgaagcttcttggattactaaccgtcaaatcgaagctgcacgtattgcgatgactcgttacatgaaacgtggcggtaaagtttggatcaaaattttcccttctaaaccttacactgctaaaccacttgaggtacgtatgggatccggtaaaggggctccagaaggttgggtagctgttgtaaaaccgggcaaagttttatttgaaatttctggtgtgtctgaagaggttgctcgtgaagcgcttcgccttgcatctcacaaattgccaattaaaacgaagttcgtaaaacgtgaagaaattggtggtgaatcaaatgaaagctaatgaaattcgtgaccttaccactgctgaaattgaacaaaaagtaaagtctcttaaagaagaacttttcaatcttcgctttcaattagcgacaggacaacttgaaaatactgctcgcattcgtgaagtgcgcaaagctatcgcgcgcatgaaaactgtgattcgtgaaagagaaattgctgctaataaataatcactgaggggaggtcgtgagcatgagcgaacgtaaccaacgcaaagtttaccaaggccgtgttgtttctgacaaaatggataaaaccattactgttgttgttgagacatacaaaaaacatacactttacggtaaacgcgtaaaatactcaaaaaaattcaaagcacatgatgaaaataatcaagctaaaatcggtgacatcgttaagatcatggaaactcgtccattgtctgcaactaagcgtttccgtctagttgaagttgtcgaagaagctgttattatctaataaagttcggaattctttttccgaagggaggtaacaaataatgattcaacaagagactcgtttaaaagtagctgacaactctggcgcacgtgaagtacttactattaaagttcttggtggttctggacgtaaaacagctaacattggtgatgtaattgtttgcacggttaaacaagcaacaccaggaggcgttgtcaaaaaaggtgaagtcgtaaaagctgttatcgttcgcactaaaagcggagcgcgcagaagtgacggttcatacatcagcttcgatgagaatgcatgtgttatcatccgtgacgacaagagcccacgcggaactcgtatcttcggaccagttgctcgtgaattgcgtgaaaacaactttatgaaaattgtttctctagctccagaagttatctaatgaaataaatgccttactcaaggaggtgcgatcaggatgcatgtaaaaaaaggcgataaagttatggttatctctggtaaagataaaggcaaacaaggaacaatccttgctgctttccctaaaaaggaccgcgttttagttgaaggtgttaacatggtaaagaaacactctaaaccaactcaagctaaccctcaaggcggtatttctaatcaagaggcgccaattcatgtatcaaacgttatgccgctcgatcctaaaacaggtgaagtgactcgcgtaggatacaaagtggaagatggcaaaaaagttcgtgtagcaaaaaaatctgggcaagttctagataaatagtattaaaaggaagggaggtctatctcatgaaccgccttaaagaaaagtacaataaagaaattgcacctgctttaatgactaagttcaattatgattcagtcatgcaagtgcctaaaatcgaaaaaatcgtaatcaacatgggtgttggtgacgctgttcaaaacgccaaagcaatcgacagtgctgttgaagaattaacgtttatcgcaggtcaaaaacctgtcgttactcgtgcgaagaaatcaattgctggattccgtcttcgtgagggaatgcctatcggtgcgaaagtaactcttcgcggagagcgcatgtatgatttccttgataaacttatttctgtatctttaccgcgtgtacgtgacttccgcggggtttctaaaaaatctttcgacggtcgcggtaactacacacttggtatcaaagaacagttaatcttccctgaaattgactacgataaagtaacaaaggttcgcggaatggacatcgttatcgtaacaactgctaatactgacgaagaagctcgtgagctattaactcaagtaggtatgccgttccagaaataatcaatgaaagggaggcgaaatcgtggctaaaaagtctatgattgcgaaacaacaacgtacaccaaagtttaaagtacaagagtacacacgctgtgaacgctgcggacgtccgcattcagtcattcgtaaatttaaactttgccgtatttgtttccgtgagcttgcatataaaggacaaattcctggcgtgaaaaaagccagctggtaatccccaagaaagggaaggaggtaattatataatggttatgacagatccaattgcagatatgctaactcgtattcgcaatgcaaacatggtacgtcatgagaagcttgaaattcctgcttctaaattgaaaagagaaattgctgaaattttaaagcgtgaaggtttcattcgtgacgttgagttcgtagaagacagcaaacaaggtatcatccgcgttttcttgaaatacggacaaaacaacgagcgcgttatcactggtcttaaaagaatcagcaagcctggtttgcgtgtttatgctaaatctaatgaagtaccccgcgtacttaacggtcttggaatcgcgattatttctacatcacaaggtgttttaacggacaaagaagcccgtgcaaaacaagctggtggagaagttctagcatacgtttggtaagaagtttaacatgaatggaggtgtttggtatgtctcgtgtaggtaagaagctacttgagattccttctgatgttacagtaacgttaaatgataacaacactgtagctgtgaaaggaccaaaaggagaattaactcgtacgtttcaccctgatatggagattaaagtagaggacaatgtgcttacagtcgctcgtccttctgatcaaaaagagcaccgtgccctgcatggtacgactcgcagtctgcttggcaacatggttgaaggtgtatctaaaggatttgaaagaggtttggaattagtcggtgtcggttaccgtgcttctaaatccggaaataaacttgttttaaacgttggatactctcatcctgttgagatcgttcctgaagaaggcatcgaaatcgaagttccttctcaaacaaaagtagttgtaaaaggtacagacaaagaacgcgtaggagctattgctgctaacatccgcgctgtacgttctccagagccttacaaaggtaaaggaatccgctacgaaggtgaagttgttcgccgtaaagaaggtaaatctgctaagtaagatcgcttaaagtgaagaaaggagtgacctagatgattacgaaaactagcaaaaatgctgctcgtcttaaaagacacgctcgtgttcgcgctaaactttccggtactgctgaaagaccgcgcctgaacgttttccgttctaacaagcacatttacgctcaaatcatcgatgatgtaaatggtgtaacacttgctagtgcatctactctcgataaagacttgaacgttgaaagcactggagatacttctgctgctactaaagttggagaattagttgcaaaacgcgctgctgaaaaaggcatttctgacgtagtatttgaccgtggcggatacttataccatggacgtgtaaaagctttggctgatgccgctcgtgaagctggacttaaattttaataaaagaaggagggacacatgattatgcgtcgtattgacccaagcaaattagagttagaagaacgcttagttacggttaaccgcgtagcgaaagttgttaaaggtggtcgtcgtttccgcttcgcagctctagtcgttgtcggtgacaaaaacggacacgtaggattcggtactggtaaagcacaagaagtaccagaagcgatccgcaaagctgttgaagatgcgaaaaagaatttgattgaagtaccaatggttggaactacaattccacacgaaatcatcggacgtttcggtgcaggtaacatcttgttaaaacctgcttctgaaggtactggagttatcgctggaggccctgtacgtgcggtacttgagctagctggtgtagctgatatcctttctaagtctttaggttctaacacaccgatcaacatgattcgtgcaacacttcaaggtttaagtgagcttaaacgtgctgaagacgttgcgaagcttcgtggaaaatctgtagaagaactgttaggataaggagggaacattaatggctaaattagaaattaccctcaaacgaagtgtaatcggtcgcccggaagaccaacgcgttactgtaagaacacttggtttaaagaaaacaaaccaaactgttgttcatgaagacaacgctgcgatccgtggtatgattaataaagtatctcatttagtttctgttaaagaacaataaaaatatttgatcggataaggaggtgtcctaatgaaacttcatgaattaaaaccttcagaaggttcacgtaaaacgcgtaatcgcgtaggtcgtggtattggttctggcaacggtaaaacagctggtaaaggtcacaaaggtcaaaacgctcgttctggcggcggtgtacgccctggattcgaggggggacaaatgcctttattccaacgtcttcctaaacgcggtttcactaacatcaaccgcaaggaatacgctgtagtcaacctagacaaattgaacggttttgcagaaggaacggaagtcactcctgaacttcttctagagactggtgttattagcaaacttaatgcaggagtaaagattcttggcaacggtaaattagagaaaaaattaactgtaaaagccaataaattctctgcttctgcgaaagaagctgttgaagctgctggcggtacagctgaggtgatctaacttgtttaaaacaatctccaactttatgcgtgtgagtgatatcaggaataaaatcatattcactttactcatgcttatcgtctttcgcataggtgcgtttattcctgtgccttacgttaacgctgaagcgttacaggcacagtctcaaatgggtgtttttgatctccttaatacatttggcggcggtgcgctttaccaattttccattttcgcaatgggaattactccttatatcacggcttcgatcatcattcagctgcttcagatggatgtggtaccgaagtttaccgagtggtctaagcaaggtgaagttggccgccgtaaattagctcagttcacaaggtactttacgattgtgcttggtttcatccaagcgttaggtatgtcatatggattcaacaatctggcaaacggtatgctgatcgaaaaatccggtgtatcgacatatcttatcattgctttagtgctcactggcggaactgcctttttaatgtggcttggggaacaaattacttctcatggagtaggcaacggaatatcgatcattatcttcgcggggattgtgtctagtattccaaaaacaattgggcaaatatatgagactcaatttgtcggcagcaacgatcagttgtttattcatattgtgaaagtcgcacttcttgtgattgcgattttagcagttattgttggagttattttcattcagcaagccgtacggaaaattgcgattcaatatgctaaaggcacaggtcgttcacctgctggcggaggtcagtctacacaccttccattgaaagtgaatcctgcaggggttattccggtaatctttgcggttgcgtttttgataacgccgcggacgatcgcgtcattctttggaacaaacgatgtgacaaagtggattcaaaacaactttgataatacgcatccggtgggtatggcgatatatgttgcgttgattattgcctttacgtacttttatgcttttgtacaggtaaaccctgaacaaatggctgataaccttaaaaaacagggtggctatatcccgggggttcgtccagggaaaatgactcaagatagaattacgagcattttgtatcgacttacgtttgtgggttctatattcttagccgtgatttccattcttcctatctttttcattcaattcgctggattgcctcaaagtgcacaaattggcggaacatctttgttaattgttgtcggggtagccttggagacaatgaaacaactagaaagccagttggtgaaacgaaactaccgtggatttatgaaaaactagaggaaatggatttatccattccctcttaataaagagaggacgggggaaatccgaatgaacttagtcttaatggggcttcctggtgccggtaaaggcacacagggcgaacgaattgttgaggattatgggattcctcatatctcaacaggagatatgttccgtgctgctatgaaagaagaaacaccactcggactcgaagcaaaatcttatattgataagggagagctcgtacctgacgaagtcacaatcggaattgtaaaagagagacttggcaaagatgattgtgaaagaggttttcttctggacggatttccgcgaacagtcgctcaagccgaagctcttgaagaaattcttgaggaatacggcaagccgattgattatgtcattaacattgaagtcgacaaagatgttctgatggaacgtctgactggacgcagaatttgcagtgtttgcggcacaacctatcatttagtctttaatccgccgaaaacgccgggtatttgtgataaagacggaggcgaactctatcaacgggcagatgataatgaggaaacagtctctaaacggcttgaggtaaacatgaagcaaactcagcctttactcgatttctattcagagaaaggttatcttgcaaacgtgaatggccagcaggacattcaagacgtttatgcagatgtgaaggatcttcttggaggattaaaaaaatgattatctgtaaaaccccacgtgaacttggtatcatgcgggaagcagggcgaatcgtggctttaactcatgaagagttaaaaaagcacattaaaccaggaatctcgacaaaagaattggatcaaattgccgaacgttttattaagaagcagggtgcaatcccatcttttaaggggtataatgggtttcgcgggagcatttgcgtatcagttaatgaagaactcgttcacggcatacctggcagcagggtgctgaaggacggtgacatcatcagtattgatatcggtgctaaattaaatggttatcatggtgactctgcatggacatatccggtaggaaacatcagcgatgatgacaaaaaacttctggaagtgacagaggagtctttatataaaggcttgcaggaagcaaaaccaggtgaacgtttgtcgaatatttcccacgcaatacaaacgtatgtcgaaaatgagcagttttcagttgttagggagtatgtcggacatggtgttggtcaagacttgcatgaggacccgcaaattcctcattacggtccgcccaacaaaggaccacggcttaaacctggcatggttctcgctattgaacctatggtgaacgctggcagccgctacgtgaaaacattggctgataactggacggttgtaacggtagatgggaaaaagtgtgctcattttgaacatacgattgcgattacggaaacgggttttgatatactgacgagagtctagatgatgaaaataattccgaagacagatgtttttcaagcttgatagggcagaaagcttgggtgaacattggcaagaccgaattcatcttgctgcttgtcgttggaattttaaccatcatcaatgtactaacagcagacggagaaaagcgtacatttcattctcctaagaaaaagaatatcaatcatttaaccctttatgattgcgtatctccggaagttcagaacagtataaacgaaacagggcgtgtgacaaacttcttttgaaatttgtcagaaagcaagttactgatttgaagaagggagaacacttgaatggcgaaagacgatgtaattgaagtggaaggtactatagtcgaaacactgccaaacgcgatgttcaaagttgaacttgaaaatggccacactgttttggctcatgtatctggtaaaatccgcatgcacttcattcgcattttacctggagacaaagttacggtagaattatctccatatgacttaactcgtggcaggattacgtaccgttacaaataaagcactccggaaactgaaggaggttggaaacacatgaaagtgagaccatcagttaaaccaatctgcgaaaaatgtaaagttattcgcagaaaaggaaaagtaatggtgatctgtgaaaatccaaagcataaacaaaaacaaggataatttataaggaggtgcccagagaatggctcgtattgctggtgtagatatcccacgtgacaaacgtgttgttatttctttaacatacatcttcggaattggccgcacaacggctcagcaagttttaaaagaagctggagtttcagaagatactcgtgtgcgcgatcttactgaagaagaacttggtaaaatccgtgatattattgacaaactgaaagtagaaggtgaccttcgccgtgaagtttctcttaatatcaaacgtctgatcgaaatcggaagctaccgcggaatccgtcatcgcagaggattacctgttcgcggacaaaactctaaaaacaacgcgcgtactcgtaaaggtccgcgtcgtactgtagctaacaagaaaaaataagtaagggaggttcttaaacaatggctgctgctcgtaaatctaacacgcgtaaacgtcgcgtgaaaaagaatattgagtctggaattgctcatattcgttcaactttcaataacacgatcgttacgatcactgacactcatggtaatgctatttcttggtctagtgccggagctttaggattcagaggttctcgtaaatctactccttttgctgcgcaaatggctgcagaaacagctgctaaaggttcaatcgaacatggtcttaaaactctagaggttactgttaaaggacctggttcaggccgtgaagctgcaatccgtgcacttcaagctgctggactagaagtcactgctatcagagacgtaactcctgttcctcataacggatgccgtccaccaaaacgtcgccgcgtgtaatttgtttgtatagattttgtgtccctgtcaataatgggttatgatacagttatttatgaaacgaatgcaccgactcgttgcctgagcacatacgggactaaacaatggggaatttcggatggaatctcatatgattctattcgaggtttcgacgttttgaaggagggttttaagtaatgatcgagattgaaaaaccaaaaatcgaaacggttgaaatcagcgacgatgccaaatttggtaagtttgtcgtagagccacttgagcgtggatatggtacaactctgggtaactccttacgtcgtatcctcttatcctcactccctggtgccgctgtaacatcaatccagatagatggtgtactgcacgaattctcgacaattgaaggcgttgtggaagatgttacaacgattatcttacacattaaaaagcttgcattgaaaatctactctgatgaagagaagacgctagaaattgatgtacagggtgaaggaactgtaacggcagctgatattacacacgatagtgatgtagagatcttaaatcctgatcttcatatcgcgactcttggtgagaatgcgagtttccgagttcgccttactgctcaaagaggacgtgggtatacgcctgctgacgcaaacaagagagacgatcagccaatcggcgtgattccgatcgattctatctatacgccagtttctcgtgtatcttatcaggtagagaacactcgtgtaggccaagttgcaaactatgataaacttacacttgatgtttggactgatggaagcactggaccgaaagaagcaattgcgcttggttcaaagattttaactgaacaccttaatatattcgttggtttaactgacgaagctcaacatgctgaaatcatggttgaaaaagaagaagatcaaaaagagaaagttcttgaaatgacaattgaagaattggatctttctgttcgttcttacaactgcttaaagcgtgcgggtattaacacggttcaagagcttgcgaacaagacggaagaagatatgatgaaagttcgaaatctaggacgcaaatcacttgaagaagtgaaagcgaaactagaagaacttggactcggacttcgcaaagacgattgactagtttcccttgtgaactaggattttcgtgtgtttattattcagaaacagcattccaataaaggaggggacatcacatgtcatacagaaaactaggacgtacgagtgcacagcgtaaagctatgcttcgtgatcttacaactgatttgatcatcaacgaaagaatcgaaacaactgaaacacgtgcgaaagaacttcgctctgtagttgaaaaaatgatcacgcttggcaaacgcggtgatcttcacgctcgccgtcaagctgctgcatacatccgcaacgaggttgcaaacgaagaaaataaccaagatgcacttcaaaaattattctctgacattgcaactcgttacgaggagcgccaaggcggatacacacgtattatgaagcttggtcctcgccgtggtgacggagcaccaatggcaattatcgaattggtttaatcacatatttttgtgtatctaaagaagggcgggacagtttctaactggatctatgccctttttttagatactgcaacttttaatagagagaaaagcagagcattagctgagaggaggccggttttccatgaatcaaaatcagttgatatcggtagaggatatcgtatttcgatatcggaaggacgcagaaagacgagcactagacggcgtctccctgcaggtgtatgagggtgaatggcttgcaatcgtaggtcataacggttcagggaaatcaacactggcccgggcattgaatggtttaattcttcctgaatcaggcgacattgaggttgccgggattcaattgacagaggaatctgtttgggaagtgcgtaagaagataggtatggtctttcaaaatccggataaccaatttgtcggaacgactgttcgcgatgatgtggcttttggtttagaaaacaatggtgtaccgcgggaagaaatgattgagagagtagactgggcagtaaaacaggtgaatatgcaagattttctcgatcaagagccgcaccatctctccggaggccaaaagcagagagttgcgattgcgggggttattgccgcacgtcctgatattattatcttagatgaagcaacatccatgcttgatccgatcgggcgagaagaagtgcttgaaacggtaagacatttaaaagagcagggcatggcgactgtcatatccattacacatgatctgaatgaggcagcaaaagcagacaggatcattgtcatgaatggcggtaaaaaatatgctgaagggccgcctgaagagatttttaaattgaataaagaacttgttcgaattgggcttgatttacccttctcattccagcttagccagcttttaagagaaaatggactggctttggaagaaaaccatttgactcaggaagggctggtgaaagagctgtggacattacaatcaaagatgtagagcatcgctatcagatgaagacgccgtttgagcgcctagcactgtatgatatcaatgcatcgattaaagaaggaagctacgtagccgttatcgggcatacaggctctggcaagtccactcttcttcagcacctaaatggtctcctgaagccgacgaagggacagatatcactaggcagcactgtcattcaggcagggaaaaagaataaagatctgaaaaaacttcgtaaaaaagtcggaatcgttttccaatttcctgagcatcaattattcgaagaaacagttcttaaagatatttcattcggaccgatgaactttggtgttaaaaaagaagatgctgaacaaaaagcgagagagatgctgcagcttgtaggtttatcagaagagcttttggacaggtcaccctttgaattaagcgggggacaaatgcgcagagttgcaattgccggcgtacttgcaatggaccctgaagtgcttgttctcgatgaaccgactgcaggattggacccaagagggcgaaaagagattatggacatgttttatgagcttcatcaacgtgggaacctgacgacgatccttgtgacacacagcatggaggatgcagctgcatacgctgatgaaatgattgttatgcataaaggaatgatacaagcatcaggcagtccgcgtgatctgtttttaaagggtgaagagatggccggctgggggctggatcttcctgaaacaataaaattccaaagacaccttgaagctgtactgggtgtgagatttaatgagcctatgctcacaatcgaagatgccgctgccaaaatccgtgctctttttcagggggagaagactttatgatggacagcatgattatcggcaagtatgtaccgggtacttcacttgtgcaccggcttgaccccagaacaaaactgatcacgatctttttatttgtctgcatcgtattcttagccaataatgttcagacatatgcgttgcttggtttatttacaattggcgtcgtttctttaacaagagttcctttctcttttttaatgaaagggctgaagccaatcatctggattgtcctttttacgttccttcttcacatccttatgacacatgaaggaccgattatctttcaaataggttttttcaaagtctatgagggcggtctggttcaggggatattcatttctcttagattcgtctatttgattttaatcacaaccttattaacgcttacgaccacaccgattgagattaccgatggaatggaacagctgctgaacccattgaaaaaattaaagcttcctgttcatgagctggctcttatgatgtcaatttctttacggtttattccgacactgatggaggagacagataagatcatgaaggctcagatggcgcgaggcgttgattttacaagcgggcctgtcaaagatagagtgaaggctattgtcccgcttcttgtcccgctcttcgtcagcgcatttaaacgcgccgaagagcttgcggtggcaatggaagcaagaggctatcaaggcggagaaggacgtacgaaatatagaaagcttgtatggacaggaaaagacacttctgtcattgtcagcttaattgtattagctgctttgttatttttcttaagggcttagaggtgctgtatgagactgaaatgcacgatttcttatgacggacatttgtttaacggttatcaggttcagccgggcaaaagaacggttcaggatgaactggagaaggctttggctgtcctgcataagtcaaaagacagaattccggttgtttcgtctggaagaacagacagcggggttcacgcagccggacaggtgattcattttgacactccgctgtctatcccggctgagagatggccatatgccttaaatgcactgcttccggacgatatcgcagtcaaacaggcagaaattgcggatgatgggttccatgcacgatttagcgcagtcaaaaaagaatatcgctactttgtatacacggagaaacacccggacgtatttaaacggcattacgcttaccatttttcatatcgccttaatgtgcaggacatgagagaagcggcaaagcatcttatagggacacatgattttacgagcttttgcgcggctaaaacagaagtgcaggacaaggtaagaacgatatacgaacttgattggactgagacggctgacggcctgcaaatgcggatcacaggcagcggtttcttatataatatggtcagaattattgcgggtactttgcttgatgcaggtattggaaaaatttctcccgatgaggtgaaatccatgctggaagcgaaggatcgcgaagcggcagggcgcacagcgccggggcacgggctatatttatggaacgtttactatgacaactaaaccaggtgtataatattttcttgacagagtctgcataaagttataagatatcatatggtatgtatttcaaccccacgataagccccggaacttattgtgttgtgaaatagaacgtaatcgaagtttattgaaaatgacagatcatttaggagggaaattcaatgcgtacaacacctatggctaacgcaagtactattgaacgcaagtggttagttgttgatgctgctggcaagactttaggtcgtctttcttcagaagttgcagctatccttcgcggaaaacacaaaccaacttacacaccacacgttgatactggagatcatgtgatcatcatcaacgctgaaaaaatcgagttaactggtaaaaagttaactgacaaaatctactaccgtcacactcaacatccaggcggattaaaatcaagaactgctcttgaaatgcgtacaaactaccctgagaaaatgcttgagcttgctatcaaaggcatgcttccaaaaggttctctaggtcgtcaaatgttcaaaaaattgaacgtataccgtggttctgagcatccacacgaagcacaaaaacctgaagtttacgaacttcgcggttaattaaaaaggaggttaccaatttggcacaggttcaatattacggtactggccgtcgtaaaagctctgtagcgcgtgtgcgtttagttccaggagaaggccgtatcgtcgttaataatcgtgaaatcagcgaacatatcccatctgcagctttaatcgaagatatcaaacaaccattaactttgactgaaacagctggcacttatgatgttttagtaaacgtacatggaggcggcctatctggtcaagctggagcaatccgtcacggtatcgctcgtgctttgcttgaagcagatccagaataccgtacaactcttaaacgtgcaggtcttctgactcgtgacgctcgtatgaaagaacgtaaaaaatacggtcttaaaggcgctcgtcgtgcacctcagttctcaaaacgttaattttacgttttcaaaaagctctcgaccttgggttgggagcttttttctttcaataaaacgtggcagcctcgcataaaaataacaactgaatggacgtttggcggggttaagcaaattgtttgtttataaacggtctctttgtaataatcatgttagctttcattcttattcaattggaacttcggtcaatgtttattatcgttatgtgctcagcccagcttcatctaaccactgtatctcatccgttaaagttcactgctgattcttaacccggagaaacaatagctctcattgctaatggctttatgtaacgaagtaaaagtaaatctgatgatataaatcacatatctcctttgtgatttttttgcgtttttatgaacttttttctaaatatgcaaagggaaagcgatatcaatctagaaatatttgttatactctatacattaaagtaaggagaagattcatgaatgcgttagtagctcataatagcaaagcctgggataaaaaagtagaaacaggcaatgaatggactgttgctgttgagcagcaggttatcgaacaagcaaaaaaaggcaattgggatataagggtaacaccaatgaaagatgtaccgaaggattggtttccgcctatcaaaggtctgaaagtactctgtttagcatcaggcggcggccagcagggtccagttttggcagccgcaggcgcggatgtcaccgtattagataactcagaaaaacaactgaatcaggataaaatgattgctgagcgagatggtctcacgatacacactgtcaaaggaagcatggacgatttaagtgtatttaatgatgaatcatttgatgtcattgtacatcctgttgccaatgtttttgttgagaatgtcctcccggtatggaaggaagcgtaccgtgtgttgaaaaggaacggcattctaatctcgggttttgtcaatcctgttgtatttctgtttgatacagaattagaacagcaaggtgttttaaaagtaaaacactccattccatacgctgacccagaagatcttccgaaacataaagtgaaaaaactgatcgaaaataatgaggctctggaattcggtcattccttagaagaccaaatcaaaggccagattgatgccggttttatcgttactggtttttatgaagataaaggcgggtttgtattagaccaatatatccatacatattctgcaacaagaagcgtgaaagtatgaaaagcagcgacctgttagaggggctgcttttttcataaccaattacagaacgtttgttccgcaccctgcggaaagctgattttttatcgattttacaccttcatttgggcgaatttccaaccgaattcgggcattgtttcatcatccaaacctcaaaataatcggtaaaaggagagtgaatttatatggcagaagtactgtcttttatggatgtgaaacgccaaaaggattttgaattagaaaagaacttgctcaaagaactctctctgagacaaattatccagtctgttaaggattgtttggaaccattatttccatttttacatgatgaacgagatattattactgaaggctgtattgattttgcgattgaagcttatttgttaggcgggcgttttgggatattcggctattacggagaatccatgcagagtatcagtgcccgctctgcaagagaagaagaagagctacgtatggagttttttgattatctctataattggatacacgagcaatacgcaacatttgataaaaacacggtttatgaagcggcacgcaagttcattaaagattggtggacagcggggtttgttcaaagagaaaaacagtgtaagcttcgcatgcgataatcatatttcccggccctgtcccatagttatgtaataacggacaagcgggaggggaagggatgaggaaaaagcttaaatggctcagttttttgctaggcttcatcgtattactatttctgttcaaatatcagttcagcaataacgactcttggaagccgtggagcttgcccttgagcggtaaaatcatttatctagatccaggtcatggcgggcctgacggcggagcagtcggcggaaagctgttagagaaggatgttaccctggaagtggcctttagagtcagggattatcttcaagaacaaggagcgcttgttatcatgaccagagaaagtgatactgatctcgctccagaaggaacaaaaggctatagtcgacgaaaagctgaggatctaagacaacgagtcaaattaataaaccattcagaggcggagctctatatcagcattcatcttaatgcgattccgtcacaaaaatggagcggagcccaaagcttttattacgggaaatatgcggaaaatgagaaagtcgcaaaatacatccaggatgagctgagaagaaatctggaaaacacaacccggaaagcaaagcggattcatggtatctacttaatgcaaaacgtcaccaaaccgggggcgcttatagaagtcggatttttatccaatccaaacgaagcaacgctactcggtaaaccgaaatatcacgacaaggtggcatcttccatatataaaggcattttgcgatatttcacagaaaaaggagaccctccggagtaatggagggttttcttgtggttctaagcataagacacccgccatttatgtatgatataataataattgtaaacgaatacacaaaagggtgaggttcgatgataagagaagatgaagtaagaaaactagtcggagaaatgcgcgaaccttttcttcaaagacctctgggagaattggatgccgttaaggaaattaaaataaagcctgaaaaacggcatatcagtgtaaaagtcgctcttgcaaaaacaggaactgcagaacaaatgcagattcagcaagagatcgtaaacgtattaaaaggggcaggagctgagacagtcggccttcgatttgaagagctgcctgaagaaacggttgctaaattccgggcgccgtcagctgagaaaaaaacattattaaatatggataacccgccagtctttcttgctgtagcaagtggaaaaggcggcgtaggcaagtcaactgtgtcagtaaacctagctatttctctggctcgtctagggaaaaaggttggtttaattgatgcggatatttatgggttcagtgtgccggacatgatgggtatcactgtgcgtccaacaattgaaggagagaaacttcttcctgttgaacgctttggagtaaaggtcatgtcaatgggctttttcgtagaagaaaatgccccggtcgtatggagagggcccatgctcggcaaaatgctgaataattttttccatgaagtagagtggggagaagtagactatatcgttcttgatcttccgcctggtacaggggacgttgctctcgatgtacatacaatgcttccgagctgcaaagaaattatcgtatctacgccacatccgacagctgcttttgtcgcggccagagcgggctctatggcgattaaaaccgatcatgaggtcgtgggtgtcatagagaacatggcttattatgaaagtgcaaagacaggggaaagagaatatgtgtttggaaaaggcggaggagataaactggctgaggaactaaacgtgcctttgctcggcagaatcccattgaaacagcccgattgggataaggaccaatttgctccgtctgtttatgacgaaaatcatccaatcggagaaatatatcaggacatcgcaaaaaaaatagatgcaaaaatgtcagtgcaggtataaaaggtgaaccgggattccagatcccggctttccctttattcactttcttttgctgtgtcttttgctgcttttttcagctcatcttcgaactgctttttgtaaagcggactagaaagtgtttcgttaataacctcttctaaataactgcggaattcttggctttttgccagctggctgtactttttatccatgccgggatcctgcataacgctcatcagcatcttctggtaatctggatccttcatcagctttttaatcactttttcatgctctgtctgaagagttttggcaaagccctcagcaaaatcagtgtcttcaaagatgtttttccaaaattcttcaccttttttagatgtgagtgttttttctattgttcctttaattgcatcttggtcaatcaccagcgcttcattcatggcatcatcatttaataattccttaatagctttctttccatcatcagtttttaatatatcaacaaccatttttttggtctgatcatagtccatatccgttgcttggtcttttggagcgcaagctgttacagataataacaaaaaacagctcatcaatagcgttttggcttttgacatgcttaagctcctttcacatacttgtcttacctttaatatgattcatctgtttggaattatacataacaaaatatcgctgttcgcgatttttgaggggatgaataaagaaatgaaaagccgtggtttagttcgttttttcttttctattttagctgtcggggcgcttatcacgagtattgtgggttttgctttaaagtggggagaatatagagggctgtttctaacatttgaagcgggacagattttctctgttttattttggtttatcggtgtaggcatgattttcagtgtgatcagccaaatgggttttttcgtgtttttaacagttcatcggtttgcgcttgagatattaaggtcctcctctttgtggaatttgctgcagttgtttttcatcctgtttgttgcttttgatttaatgtacgtgcgttttttattttttggagagagcggagaatcgctggctggctatgcgtggttaccggtgtttttattgatctttggagtgattacagcttatataaagcaaaagcagtcctctaagaaaacatttgtgtcatcgttatttttgatggttgtgattaccgcattagaatggttccctgcattaagagtaaatgatgaggactggctttatttaatgctttttccgttaatggcatgtaatgccttccaattgctgatgctgccgaagtttgcagcaaagtaattactttacctctgcggatttggcatcagaatttgcgatgagatcacccacggttacattttttaatcctttttctttcagctgatggatgatatcaggcaatgcttcttctgtttgttttgcagaatcggaggcatgtaaaagaataatgtctccaccggaaacttgcttggtcacattgtcgatgattttttcaactccgggatttgtccagtcttgagagttcacactgtaatgaacgactgtataattgtattgctttgcgacctttagaacattcttattgaattggccggtagggggtcttaatagctgtatgtctttgacccctaacttttcaaaggctgtttgcgcacggttcatgtccttttttatttcgctgctctctaaattggcatagtttttataagcgtagcccatgctcccgatttgatggccgtcctttacgatacgggccactgtgtcgggatggcgttctgcccaagaagcggacaggaaaaacgttgcgtttttaatcccgtttgctttcagagtattaagtatcggttctgctctctcatcaccccagctgatatcgaaagtaagtgaaatatctttagagtctgtttctcctttataaatggctttaggtccggtgtcagttgaaaacacgggaagcgggacagctctttggatataaaaaaagctggcagctgcaaatgcggcgataagtataataattaattgttttacccgtttaatgtgccacacatagaagtgattcactgatgatgcctccttatcttgtccatcattcttgttttacatcttatgagcatggacaattgaatataaccgataaaatgtctcttcacatacagcctaaattgggtgttgaccttttgataatatccgtgatatattattattcgtcgctgataaacagctgacatcaactaaaagcttcattaaatactttgaaaaaagttgttgacttaaaagaagctaaatgttatagtaataaagctgcttcgttaagcggcagtaatgatctttgaaaactaaacaagacaaaacgtacctgttaattcatttttataaatcgcacagcgatgtgcgtagtcagtcaaactagggcctgtacgatgcaggtcacacaggtgtcgccgcaggatgcggtgaacttaacctgtgatccatttatcggagagtttgatcctggctcaggacgaacgctggcggcgtgcctaatacatgcaagtcgagcggacagatgggagcttgctccctgatgttagcggcggacgggtgagtaacacgtgggtaacctgcctgtaagactgggataactccgggaaaccggggctaataccggatggttgtttgaaccgcatggttcaaacataaaaggtggcttcggctaccacttacagatggacccgcggcgcattagctagttggtgaggtaatggctcaccaaggcaacgatgcgtagccgacctgagagggtgatcggccacactgggactgagacacggcccagactcctacgggaggcagcagtagggaatcttccgcaatggacgaaagtctgacggagcaacgccgcgtgagtgatgaaggttttcggatcgtaaagctctgttgttagggaagaacaagtaccgttcgaatagggcggtaccttgacggtacctaaccagaaagccacggctaactacgtgccagcagccgcggtaatacgtaggtggcaagcgttgtccggaattattgggcgtaaagggctcgcaggcggtttcttaagtctgatgtgaaagcccccggctcaaccggggagggtcattggaaactggggaacttgagtgcagaagaggagagtggaattccacgtgtagcggtgaaatgcgtagagatgtggaggaacaccagtggcgaaggcgactctctggtctgtaactgacgctgaggagcgaaagcgtggggagcgaacaggattagataccctggtagtccacgccgtaaacgatgagtgctaagtgttagggggtttccgccccttagtgctgcagctaacgcattaagcactccgcctggggagtacggtcgcaagactgaaactcaaaggaattgacgggggcccgcacaagcggtggagcatgtggtttaattcgaagcaacgcgaagaaccttaccaggtcttgacatcctctgacaatcctagagataggacgtccccttcgggggcagagtgacaggtggtgcatggttgtcgtcagctcgtgtcgtgagatgttgggttaagtcccgcaacgagcgcaacccttgatcttagttgccagcattcagttgggcactctaaggtgactgccggtgacaaaccggaggaaggtggggatgacgtcaaatcatcatgccccttatgacctgggctacacacgtgctacaatggacagaacaaagggcagcgaaaccgcgaggttaagccaatcccacaaatctgttctcagttcggatcgcagtctgcaactcgactgcgtgaagctggaatcgctagtaatcgcggatcagcatgccgcggtgaatacgttcccgggccttgtacacaccgcccgtcacaccacgagagtttgtaacacccgaagtcggtgaggtaaccttttaggagccagccgccgaaggtgggacagatgattggggtgaagtcgtaacaaggtagccgtatcggaaggtgcggctggatcacctcctttctaaggatattatacggaatataagaccttgggtcttataaacagaacgttccctgtcttgtttagttttgaaggatcattccttcgaaacgtgttctttgaaaactagataacagtagacatcacattcaattagtaatacaagatatcacatagtgattctttttaacggttaagttagaaagggcgcacggtggatgccttggcactaggagccgatgaaggacgggacgaacaccgatatgcttcggggagctgtaagcaagctttgatccggagatttccgaatggggaaacccaccactcgtaatggagtggtatccatatctgaattcataggatatgagaaggcagacccggggaactgaaacatctaagtacccggaggaagagaaagcaaatgcgattccctgagtagcggcgagcgaaacgggattagcccaaaccaagaggcttgcctcttggggttgtaggacactctgtacggagttacaaaagaacgaggtagatgaagaggtctggaaaggcccgccataggaggtaacagccctgtagtcaaaacttcgttctctcctgagtggatcctgagtacggcggaacacgtgaaattccgtcggaatccgggaggaccatctcccaaggctaaatactccctagtgaccgatagtgaaccagtaccgtgagggaaaggtgaaaagcaccccggaaggggagtgaaagagatcctgaaaccgtgtgcctacaagtagtcagagcccgttaacgggtgatggcgtgccttttgtagaatgaaccggcgagttacgatcccgtgcaaggttaagcagaagatgcggagccgcagcgaaagcgagtctgaatagggcgcatgagtacgtggtcgtagacccgaaaccaggtgatctacccatgtccagggtgaagttcaggtaacactgaatggaggcccgaacccacgcacgttgaaaagtgcggggatgaggtgtgggtaggggtgaaatgccaatcgaacctggagatagctggttctctccgaaatagctttagggctagcctcaaggtaagagtcttggaggtagagcactgattggactaggggcccctaccgggttaccgaattcagtcaaactccgaatgccaatgacttatccttgggagtcagactgcgagtgataagatccgtagtcgaaagggaaacagcccagaccgccagctaaggtcccaaagtatacgttaagtggaaaaggatgtggagttgcttagacaaccaggatgttggcttagaagcagccaccatttaaagagtgcgtaatagctcactggtcgagtgactctgcgccgaaaatgtaccggggctaaacgtatcaccgaagctgcggactgttcttcgaacagtggtaggagagcgttctaagggctgtgaagccagaccggaaggactggtggagcgcttagaagtgagaatgccggtatgagtagcgaaagaggggtgagaatcccctccaccgaatgcctaaggtttcctgaggaaggctcgtccgctcagggttagtcgggacctaagccgaggccgaaaggcgtaggcgatggacaacaggttgatattcctgtaccacctcctcaccatttgagcaatggggggacgcaggaggatagggtaagcgcggtattggatatccgcgtccaagcagttaggctgggaaataggcaaatccgtttcccataaggctgagctgtgatggcgagcgaaatatagtagcgaagttcctgattccacactgccaagaaaagcctctagcgaggtgagaggtgcccgtaccgcaaaccgacacaggtaggcgaggagagaatcctaaggtgatcgagagaactctcgttaaggaactcggcaaaatgaccccgtaacttcgggagaaggggtgctctgttagggtgcaagcccgagagagccgcagtgaataggcccaggcgactgtttagcaaaaacacaggtctctgcgaagccgtaaggcgaagtataggggctgacgcctgcccggtgctggaaggttaagaggagcgcttagcgtaagcgaaggtgcgaattgaagccccagtaaacggcggccgtaactataacggtcctaaggtagcgaaattccttgtcgggtaagttccgacccgcacgaaaggcgcaacgatctgggcactgtctcaacgagagactcggtgaaattatagtacctgtgaagatgcaggttacccgcgacaggacggaaagaccccgtggagctttactgcagcctgatattgaatgttggtacagcttgtacaggataggtaggagccttggaaaccggagcgccagcttcggtggaggcatcggtgggatactaccctggctgtattgaccttctaacccgccgcccttatcgggcggggagacagtgtcaggtgggcagtttgactggggcggtcgcctcctaaaaggtaacggaggcgcccaaaggttccctcagaatggttggaaatcattcgcagagtgtaaaggcacaagggagcttgactgcgagacctacaagtcgagcagggacgaaagtcgggcttagtgatccggtggttccgcatggaagggccatcgctcaacggataaaagctaccccggggataacaggcttatctcccccaagagtccacatcgacggggaggtttggcacctcgatgtcggctcatcgcatcctggggctgtagtcggtcccaagggttgggctgttcgcccattaaagcggtacgcgagctgggttcagaacgtcgtgagacagttcggtccctatccgtcgcgggcgcaggaaatttgagaggagctgtccttagtacgagaggaccgggatggacgcaccgctggtgtaccagttgttctgccaagggcatcgctgggtagctatgtgcggacgggataagtgctgaaagcatctaagcatgaagcccccctcaagatgagatttcccattccgcaaggaagtaagatccctgaaagatgatcaggttgataggtctgaggtggaagtgtggcgacacatggagctgacagatactaatcgatcgaggacttaaccatatttttgaatgatgtcacacctgttatctagttttgagagaacactctcaatttgtttggtggcgatagcgaagaggtcacacccgttcccataccgaacacggaagttaagctcttcagcgccgatggtagtcgggggtttccccctgtgagagtaggacgccgccaagcagatttattaattctaccatgtttgtttatgaagctttatattattccgcagtagctcagtggtagagctatcggctgttaaccgatcggtcgtaggttcgaatcctacctgcggagccattgcttccatagctcagcaggtagagcacttccatggtaaggaagaggtcagcggttcgagcccgcttggaagctttatttaatgtattattaccaaggtttctcataaggagaaagctttttttattgcgatatgcggaagtagttcagtggtagaacaccaccttgccaaggtgggggtcgcgggttcgaatcccgtcttccgctccatttatcccaacgggatattgtaaattgaattgcgcccgtagctcaattggatagagcgtttgactacggatcaaaaggttaggggttcgactcctctcgggcgcgccatatcttttaatagaatagatgggaaatcgggaagtagctcagcttggtagagcacatggtttgggaccatggggtcgcaggttcgaatcctgtcttcccgaccattttttatggggccttagctcagctgggagagcgcctgctttgcacgcaggaggtcagcggttcgatcccgctaggctccaccaaaagtttttaaaaagttgttgactttgaagaagtgacgttgtatactaataaagttactttaacaaagcaaataaacaaaatgatctttgaaaactaaacaagacaaaacgtacctgttaattcagtttttaaaaaatcgcacagcgatgtgcgtagtcagtcaaactactttatcggagagtttgatcctggctcaggacgaacgctggcggcgtgcctaatacatgcaagtcgagcggacagatgggagcttgctccctgatgttagcggcggacgggtgagtaacacgtgggtaacctgcctgtaagactgggataactccgggaaaccggggctaataccggatggttgtttgaaccgcatggttcaaacataaaaggtggcttcggctaccacttacagatggacccgcggcgcattagctagttggtgaggtaacggctcaccaaggcgacgatgcgtagccgacctgagagggtgatcggccacactgggactgagacacggcccagactcctacgggaggcagcagtagggaatcttccgcaatggacgaaagtctgacggagcaacgccgcgtgagtgatgaaggttttcggatcgtaaagctctgttgttagggaagaacaagtaccgttcgaatagggcggtaccttgacggtacctaaccagaaagccacggctaactacgtgccagcagccgcggtaatacgtaggtggcaagcgttgtccggaattattgggcgtaaagggctcgcaggcggtttcttaagtctgatgtgaaagcccccggctcaaccggggagggtcattggaaactggggaacttgagtgcagaagaggagagtggaattccacgtgtagcggtgaaatgcgtagagatgtggaggaacaccagtggcgaaggcgactctctggtctgtaactgacgctgaggagcgaaagcgtggggagcgaacaggattagataccctggtagtccacgccgtaaacgatgagtgctaagtgttagggggtttccgccccttagtgctgcagctaacgcattaagcactccgcctggggagtacggtcgcaagactgaaactcaaaggaattgacgggggcccgcacaagcggtggagcatgtggtttaattcgaagcaacgcgaagaaccttaccaggtcttgacatcctctgacaatcctagagataggacgtccccttcgggggcagagtgacaggtggtgcatggttgtcgtcagctcgtgtcgtgagatgttgggttaagtcccgcaacgagcgcaacccttgatcttagttgccagcattcagttgggcactctaaggtgactgccggtgacaaaccggaggaaggtggggatgacgtcaaatcatcatgccccttatgacctgggctacacacgtgctacaatggacagaacaaagggcagcgaaaccgcgaggttaagccaatcccacaaatctgttctcagttcggatcgcagtctgcaactcgactgcgtgaagctggaatcgctagtaatcgcggatcagcatgccgcggtgaatacgttcccgggccttgtacacaccgcccgtcacaccacgagagtttgtaacacccgaagtcggtgaggtaaccttttaggagccagccgccgaaggtgggacagatgattggggtgaagtcgtaacaaggtagccgtatcggaaggtgcggctggatcacctcctttctaaggatattatacggaatataagaccttgggtcttataaacagaacgttccctgtcttgtttagttttgaaggatcattccttcgaaacgtgttctttgaaaactagataacagtagacatcacattcaattagtaatacaagatatcacatagtgattctttttaacggttaagttagaaagggcgcacggtggatgccttggcactaggagccgatgaaggacgggacgaacaccgatatgcttcggggagctgtaagcaagctttgatccggagatttccgaatggggaaacccaccactcgtaatggagtggtatccatatctgaattcataggatatgagaaggcagacccggggaactgaaacatctaagtacccggaggaagagaaagcaaatgcgattccctgagtagcggcgagcgaaacgggattagcccaaaccaagaggcttgcctcttggggttgtaggacactctgtacggagttacaaaagaacgaggtagatgaagaggtctggaaaggcccgccataggaggtaacagccctgtagtcaaaacttcgttctctcctgagtggatcctgagtacggcggaacacgtgaaattccgtcggaatccgggaggaccatctcccaaggctaaatactccctagtgaccgatagtgaaccagtaccgtgagggaaaggtgaaaagcaccccggaaggggagtgaaagagatcctgaaaccgtgtgcctacaagtagtcagagcccgttaacgggtgatggcgtgccttttgtagaatgaaccggcgagttacgatcccgtgcaaggttaagcagaagatgcggagccgcagcgaaagcgagtctgaatagggcgcatgagtacgtggtcgtagacccgaaaccaggtgatctacccatgtccagggtgaagttcaggtaacactgaatggaggcccgaacccacgcacgttgaaaagtgcggggatgaggtgtgggtaggggtgaaatgccaatcgaacctggagatagctggttctctccgaaatagctttagggctagcctcaaggtaagagtcttggaggtagagcactgattggactaggggcccctaccgggttaccgaattcagtcaaactccgaatgccaatgacttatccttgggagtcagactgcgagtgataagatccgtagtcgaaagggaaacagcccagaccgccagctaaggtcccaaagtatacgttaagtggaaaaggatgtggagttgcttagacaaccaggatgttggcttagaagcagccaccatttaaagagtgcgtaatagctcactggtcgagtgactctgcgccgaaaatgtaccggggctaaacgtatcaccgaagctgcggactgttcttcgaacagtggtaggagagcgttctaagggctgtgaagccagaccggaaggactggtggagcgcttagaagtgagaatgccggtatgagtagcgaaagaggggtgagaatcccctccaccgaatgcctaaggtttcctgaggaaggctcgtccgctcagggttagtcgggacctaagccgaggccgaaaggcgtaggcgatggacaacaggttgatattcctgtaccacctcctcaccatttgagcaatggggggacgcaggaggatagggtaagcgcggtattggatatccgcgtccaagcagttaggctgggaaataggcaaatccgtttcccataaggctgagctgtgatggcgagcgaaatatagtagcgaagttcctgattccacactgccaagaaaagcctctagcgaggtgagaggtgcccgtaccgcaaaccgacacaggtaggcgaggagagaatcctaaggtgatcgagagaactctcgttaaggaactcggcaaaatgaccccgtaacttcgggagaaggggtgctctgttagggtgcaagcccgagagagccgcagtgaataggcccaggcgactgtttagcaaaaacacaggtctctgcgaagccgtaaggcgaagtataggggctgacgcctgcccggtgctggaaggttaagaggagcgcttagcgtaagcgaaggtgcgaattgaagccccagtaaacggcggccgtaactataacggtcctaaggtagcgaaattccttgtcgggtaagttccgacccgcacgaaaggcgcaacgatctgggcactgtctcaacgagagactcggtgaaattatagtacctgtgaagatgcaggttacccgcgacaggacggaaagaccccgtggagctttactgcagcctgatattgaatgttggtacagcttgtacaggataggtaggagccttggaaaccggagcgccagcttcggtggaggcatcggtgggatactaccctggctgtattgaccttctaacccgccgcccttatcgggcggggagacagtgtcaggtgggcagtttgactggggcggtcgcctcctaaaaggtaacggaggcgcccaaaggttccctcagaatggttggaaatcattcgcagagtgtaaaggcacaagggagcttgactgcgagacctacaagtcgagcagggacgaaagtcgggcttagtgatccggtggttccgcatggaagggccatcgctcaacggataaaagctaccccggggataacaggcttatctcccccaagagtccacatcgacggggaggtttggcacctcgatgtcggctcatcgcatcctggggctgtagtcggtcccaagggttgggctgttcgcccattaaagcggtacgcgagctgggttcagaacgtcgtgagacagttcggtccctatccgtcgcgggcgcaggaaatttgagaggagctgtccttagtacgagaggaccgggatggacgcaccgctggtgtaccagttgttctgccaagggcatcgctgggtagctatgtgcggacgggataagtgctgaaagcatctaagcatgaagcccccctcaagatgagatttcccattccgcaaggaagtaagatccctgaaagatgatcaggttgataggtctgaggtggaagtgtggcgacacatggagctgacagatactaatcgatcgaggacttaaccatatttttgaatgatgtcacacctgttatctagttttgagagaacactctcaatttgtttggtggcgatagcgaagaggtcacacccgttcccataccgaacacggaagttaagctcttcagcgccgatggtagtcgggggtttccccctgtgagagtaggacgccgccaagcaattgcacgttagtgtaattttttaaaaaaagttgttgactttgaagaagtgacgttgtatactaataaagttgctttaacaaagcggacaaacaaaatgatctttgaaaactaaacaagacaaaacgtacctgttaattcagtttttaaaaatcgcacagcgatgtgcgtagtcagtcaaactactttatcggagagtttgatcctggctcaggacgaacgctggcggcgtgcctaatacatgcaagtcgagcggacagatgggagcttgctccctgatgttagcggcggacgggtgagtaacacgtgggtaacctgcctgtaagactgggataactccgggaaaccggggctaataccggatggttgtttgaaccgcatggttcaaacataaaaggtggcttcggctaccacttacagatggacccgcggcgcattagctagttggtgaggtaacggctcaccaaggcgacgatgcgtagccgacctgagagggtgatcggccacactgggactgagacacggcccagactcctacgggaggcagcagtagggaatcttccgcaatggacgaaagtctgacggagcaacgccgcgtgagtgatgaaggttttcggatcgtaaagctctgttgttagggaagaacaagtaccgttcgaatagggcggtaccttgacggtacctaaccagaaagccacggctaactacgtgccagcagccgcggtaatacgtaggtggcaagcgttgtccggaattattgggcgtaaagggctcgcaggcggtttcttaagtctgatgtgaaagcccccggctcaaccggggagggtcattggaaactggggaacttgagtgcagaagaggagagtggaattccacgtgtagcggtgaaatgcgtagagatgtggaggaacaccagtggcgaaggcgactctctggtctgtaactgacgctgaggagcgaaagcgtggggagcgaacaggattagataccctggtagtccacgccgtaaacgatgagtgctaagtgttagggggtttccgccccttagtgctgcagctaacgcattaagcactccgcctggggagtacggtcgcaagactgaaactcaaaggaattgacgggggcccgcacaagcggtggagcatgtggtttaattcgaagcaacgcgaagaaccttaccaggtcttgacatcctctgacaatcctagagataggacgtccccttcgggggcagagtgacaggtggtgcatggttgtcgtcagctcgtgtcgtgagatgttgggttaagtcccgcaacgagcgcaacccttgatcttagttgccagcattcagttgggcactctaaggtgactgccggtgacaaaccggaggaaggtggggatgacgtcaaatcatcatgccccttatgacctgggctacacacgtgctacaatggacagaacaaagggcagcgaaaccgcgaggttaagccaatcccacaaatctgttctcagttcggatcgcagtctgcaactcgactgcgtgaagctggaatcgctagtaatcgcggatcagcatgccgcggtgaatacgttcccgggccttgtacacaccgcccgtcacaccacgagagtttgtaacacccgaagtcggtgaggtaaccttttaggagccagccgccgaaggtgggacagatgattggggtgaagtcgtaacaaggtagccgtatcggaaggtgcggctggatcacctcctttctaaggatattatacggaatataagaccttgggtcttataaacagaacgttccctgtcttgtttagttttgaaggatcattccttcgaaacgtgttctttgaaaactagataacagtagacatcacattcaattagtaacacaagatatcacatagtgattctttttaacggttaagttagaaagggcgcacggtggatgccttggcactaggagccgatgaaggacgggacgaacaccgatatgcttcggggagctgtaagcaagctttgatccggagatttccgaatggggaaacccaccactcgtaatggagtggtatccatatctgaattcataggatatgagaaggcagacccggggaactgaaacatctaagtacccggaggaagagaaagcaaatgcgattccctgagtagcggcgagcgaaacgggattagcccaaaccaagaggcttgcctcttggggttgtaggacactctgtacggagttacaaaagaacgaggtagatgaagaggtctggaaaggcccgccataggaggtaacagccctgtagtcaaaacttcgttctctcctgagtggatcctgagtacggcggaacacgtgaaattccgtcggaatccgggaggaccatctcccaaggctaaatactccctagtgaccgatagtgaaccagtaccgtgagggaaaggtgaaaagcaccccggaaggggagtgaaagagatcctgaaaccgtgtgcctacaagtagtcagagcccgttaacgggtgatggcgtgccttttgtagaatgaaccggcgagttacgatcccgtgcaaggttaagcagaagatgcggagccgcagcgaaagcgagtctgaatagggcgcatgagtacgtggtcgtagacccgaaaccaggtgatctacccatgtccagggtgaagttcaggtaacactgaatggaggcccgaacccacgcacgttgaaaagtgcggggatgaggtgtgggtaggggtgaaatgccaatcgaacctggagatagctggttctctccgaaatagctttagggctagcctcaaggtaagagtcttggaggtagagcactgattggactaggggcccctaccgggttaccgaattcagtcaaactccgaatgccaatgacttatccttgggagtcagactgcgagtgataagatccgtagtcgaaagggaaacagcccagaccgccagctaaggtcccaaagtatacgttaagtggaaaaggatgtggagttgcttagacaaccaggatgttggcttagaagcagccaccatttaaagagtgcgtaatagctcactggtcgagtgactctgcgccgaaaatgtaccggggctaaacgtatcaccgaagctgcggactgttcttcgaacagtggtaggagagcgttctaagggctgtgaagccagaccggaaggactggtggagcgcttagaagtgagaatgccggtatgagtagcgaaagaggggtgagaatcccctccaccgaatgcctaaggtttcctgaggaaggctcgtccgctcagggttagtcgggacctaagccgaggccgaaaggcgtaggcgatggacaacaggttgatattcctgtaccacctcctcaccatttgagcaatggggggacgcaggaggatagggtaagcgcggtattggatatccgcgtccaagcagttaggctgggaaataggcaaatccgtttcccataaggctgagctgtgatggcgagcgaaatatagtagcgaagttcctgattccacactgccaagaaaagcctctagcgaggtgagaggtgcccgtaccgcaaaccgacacaggtaggcgaggagagaatcctaaggtgatcgagagaactctcgttaaggaactcggcaaaatgaccccgtaacttcgggagaaggggtgctctgttagggtgcaagcccgagagagccgcagtgaataggcccaggcgactgtttagcaaaaacacaggtctctgcgaagccgtaaggcgaagtataggggctgacgcctgcccggtgctggaaggttaagaggagcgcttagcgtaagcgaaggtgcgaattgaagccccagtaaacggcggccgtaactataacggtcctaaggtagcgaaattccttgtcgggtaagttccgacccgcacgaaaggcgcaacgatctgggcactgtctcaacgagagactcggtgaaattatagtacctgtgaagatgcaggttacccgcgacaggacggaaagaccccgtggagctttactgcagcctgatattgaatgttggtacagcttgtacaggataggtaggagccttggaaaccggagcgccagcttcggtggaggcatcggtgggatactaccctggctgtattgaccttctaacccgccgcccttatcgggcggggagacagtgtcaggtgggcagtttgactggggcggtcgcctcctaaaaggtaacggaggcgcccaaaggttccctcagaatggttggaaatcattcgcagagtgtaaaggcacaagggagcttgactgcgagacctacaagtcgagcagggacgaaagtcgggcttagtgatccggtggttccgcatggaagggccatcgctcaacggataaaagctaccccggggataacaggcttatctcccccaagagtccacatcgacggggaggtttggcacctcgatgtcggctcatcgcatcctggggctgtagtcggtcccaagggttgggctgttcgcccattaaagcggtacgcgagctgggttcagaacgtcgtgagacagttcggtccctatccgtcgcgggcgcaggaaatttgagaggagctgtccttagtacgagaggaccgggatggacgcaccgctggtgtaccagttgttctgccaagggcatcgctgggtagctatgtgcggacgggataagtgctgaaagcatctaagcatgaagcccccctcaagatgagatttcccattccgcaaggaagtaagatccctgaaagatgatcaggttgataggtctgaggtggaagtgtggcgacacatggagctgacagatactaatcgatcgaggacttaaccatatttttgaatgatgtcacacctgttatctagttttgagagaacactctcaatttgtttggtggcgatagcgaagaggtcacacccgttcccataccgaacacggaagttaagctcttcagcgccgatggtagtcgggggtttccccctgtgagagtaggacgccgccaagcaagcttaaacccagctcattgagctgggttttttattttatatctgtgccgatttgcttttatcagtatccattttatcaagcttctgctttttaagttttctaatacttttgaatccaatacaatcaccagcatgatcaacatgagagtcataaataatcaaaatgcagtttgtacgggagactcatccagactccatccgtctgcaattggcagaatagagccgccaatccattggcagcgagcagcatgcctgtcgtttgttctgtttttccatgatgaaattgattggtgacaattaagataatggcgaacatgctggccataaataagtcctaagaaaaaactaagaataatccctgcaaaagctgttttattgattgccaaaatacagagttaaatgaggccgctcatatttatcagcctgagataatgatgataggttattttttcggaaaccggctcgggttgccaaatgagagaaaagatattactgtcattaaaacgattcttggtttcatccggatatgataaaatgtctcagactatatttgagccatttttttcttcagcaatcatcttgcgtaattgataaaaatttattatgatactctttgtatgacaactccttgcctcaatacaatatactcaacgtttccccgttttctccggtcgtttttcttttcattttctcccgtaaaataaaaaaagctcccaatacaatagatatggtgcggatttattttttactaaaaaggagtcgttatatttgaataatagttttacattaaaacagcaatggttcgggaatatccgaaaagacattcttgctggcattttagttgcgttagcgttaatacctgaagcgattggcttttctattatagccggtgtggatccgatggtcggtctttatgcgtcattttgcatagccattattatttctatttttggcggcagacctggcatgatttcagctgcgacaggctcaatggcagttgttatggtgtcgctggttgctgatcatgggcttcagtatttatttgcagctacgattttgactggcattattcaagtgattttaggtatcagtaaaattgcaagattaatgaaattcatcccgcgttctgtgatgatcgggtttgtgaatgcgctggcaatccttatcttctctgcgcagcttccccagtttgaaggtgcttcttggagcatgtatgcgatgcttgccgggtcgttggttattatttatgtgctgccaaggtttacgactgctgttccgtctccgcttgtggcgattattgtgatgacaattattgcggtcactttccatgtggatgtgcggacggttggtgatatgggcaatatttctagttcattgcctcatttcttaatccctgatgttccgtttacctttgaaacactgcaaattatttttccttattcaattgctttagcgtttgtcgggttgcttgaatctttgctgacagcacagattattgatgaaatgacggatacggatagtgataaaaataaagagagccgcggacagggaattgcgaatatcgtgactggattctttggcggaatggcaggctgcgctatgatcggacaatctgtcattaatacaaaagcgggcggtcgcggacgtttgtcagcatttgttgccggtgcttttctgatgtttttaattgcggtgttaagtcatgtcgtggtgaaaatcccaatggcggcgttagtggctgtaatggttatggtgtctgtcggcacttttgattggtcttctttaaaaggtctcaaaaaagcgccgctcacggactcgattgtcacggttgtgactgtggttacggttgttgtgacagatgacttatctaagggtgtatttgtcggtgttcttttaagtgccgtgttctttgtagcaaaaatctcgaagctgaaaatcgtttctcatgcagaggatcaaaagcttagaacgtatcaagtgaaggggcaaatcttttttgcgtcagtgactgatcttacgaatgcgtttatatatcaagaggatattgagcgggttgtgattgacttaactgaagctcacgtatgggacgattctggtgcggccgcacttgataagattgttgcgaagtttaaggaacaaggcattgaagctgagttaaaaggtttgaataaagcgagtaaatctctaatgaaacagatggcataaaatagagaagcccagatgaatgagatctgggcttttttatataacatacacttaagcagcattgatataatagagagaagagaaattttaaataggggacttgcatatgatgcttcagaagctgaaccgtgtattggggagagtgatgccgctgttaacgccgactagtgtggtgttgggcgtgctgctgtctcagtttttaaatgggtatgaatgggctgtaccttggatctttgcttttattacgtttgcaggcagtttgagcgcgaactttcaatctttgagacatgcattgtctcatcctctccctatgattcttgcactattcgttcttcatattttcatgccgctttttgcttggggcagcggccatcttatatttaaaggtgatcctttgacgattaccggtttaacattggctgttgtgattcctacggggattacaagcttgatttgggcagcgatgtacaaagggaatgtcggtttgacactttcgattattttaattgatactgtgctgtcaccgctaatcgtaccgctgagtctttcattgctggccggcgctcaggttcatatggatgtgtggggaatgatgaaaggtctgattgtaatggtcgtgattccttcttttctgggcatgctgtttaatcagatgtcatctccagaaagaactgcgtctgtgagcagtgcgctgtcgcctttttcaaagctttgcttgatggcagtgattgcgattaacagttcagcgattgctccttatttcaaatccattgatttgagatttgcaggaatagctgtaacggtattctttatcgcgttaacaggctatgccgctgcttggctgatcggaaaaatgatgaaaaggcggcaagaggaaatagtctctcttatatttacgggaggcatgaggaatattagtgccggcgcagttcttgccgttacgttcttcccgtctcaggttgccgttcctgttgtgatcggcatgctgtttcagcagatattggctgctttgtttggctatatgctgaatcgttttgaattaaaaccaatgttgcagaaagcataaaaaaaccgctcatagggttgagcggttttttccgtatagccattcgagcgcgttgatgaactgtttgcagaaatacttgcggtggtgcaccgctcctttttcaattgaaagatacaaccggtcttcagtgaagcctttttcttttagactttgatgaacttgctttgtttttttcagcatatgtcgctgaatggattgtttttcacggccttcttcactcccgacagacatgaaaacacgtgtagtgccgggctttaaagaagatatatgaatggtttccgctgcgttctcgtaccagtatgaacctgatatagagcctattttcccgaacattgacggatattttaataaggcgaacattgagatgaggccgcctaatgaggcaccgatcattcctcttgactgcggttccctgatgacgttccagttttcttcgattagcggaatgaactggttcgttatatcagacagatagtgatatcccattccgccgaagtccgtgaaccgatcactgagtgatgcagccggccaaggtgtgtattcatttagccggttttcgggttcgataccgatcagcacgagttcagggagcctttgctgttgatatgcgctttctaataattcgatttggttttggaacaaagaactgccatcctgcacgtaaacagcaggaaatcccccgctgtctgtgctgtaggaaggagggaggtacagcgtgaacctcctgttgccggctttgtgttctgaaagagatcctttcaagcattctccccctttttttgcttgaaaagcagatataagaaataaggaactccgaggatcgccaaaatgatgcctgcgggcacttctgcgggctgaaaaaacagttttccggcaaagtctgcgcttatcacaagaagcatcccgattaaaccgctcagtggcaggatatagcgatgttcgacgccagccagtctccgtgagatatggggagcaattaagccgacaaacgccatacttcccgctacggagacacaggcgctgatgattgctacacaggctacgagcaggatggttttttctttatttgatgaaatgccgaggcttctgactgtgtcttcatcaaaacgaatggtgtcgagcaggcgggatttgccgataagaatcggtataaacagcagcatccatgggagaacggctgtgatatacgtccagttggcagaccagatgcttccgtttttccacaccatggccatttgatagtcttgcgggtccatttttaaagataaaaacaaagacagggcgctgaatcctgaattgatcgcaatccctaccagaataattcttcctgaatctaaattgcctctgtgccatgcaaatatgtaaatcaggatcgccgcgatgagcccgcctatcaatccaaagagcggcattcccatcgctgcagctatggatgtcacttccttctggccttggaataagagcataaacgctacaatgccggctcctgcccctgcgttgattccgagaattccaggatcagcaagcccgtttctcgtgatggcctggataacagcgcctgcaatgccaagaccgagtccaataatagcagccatgacaacccgcggcagccttaaatcgaacagcaaaatttcatactgcggattcgggtagatttgaaaaagagtggagagcagctcagcaggacgaacagaaaatgatccgctcgttaagctgaaataactgacaacaagaatcaaagcgatgaacaatgcatattttttagccattttgctcccctccttttcgtttaattaaataaaggaagaaaggtacgccgataatggatgttacgacctcaatcggtgtttcaaacggatagttgataaatctgcttgcgagatcacacagggttaaaaagattccgcccaaaatacaggagcacggaatcagcctgctgtaatcagagccgacgagaaatctcgtgatatgcggaacaaccaatccgacaaacgcaatttttccggccagcgctacggcactgccggttaaaatgatgacggaaagcatcgccatgattttaatggtttttttcttttgccccaggcttttagaaatgtcgtcccctaatgatacagcggttacctttttgctgagagaaatggccattataatgccaatcaggaaaaacggagcggcgagcttcaggaaatccggactcatttgatgaagtctggcactgtaccagaaactgagatcctgagaaatttgaaaataaatcgacatggccgctgataagctgctgagcagcatgcttgtgactgtgccgatgatggcgagctgcacgggggtaaatccgtttggcatcatggcggcaaggccgaatactaacacagctcctaacgctgagccgataaaagagtatatcatcatttcaatcgaagatgattgcgggagcagaaccatgcaaagcgtaatgataaacgctgaaccatctgaaacacccataatggatggcgaagctaaataattgcgcgtaatgccctgcataagcgctccagaaacagcaagggctgcccctatgagcagagcgccggcagcccttggaatccgggaatgccatataatttgatggtctgtgtttcccggatcgaaatgaataagagatgtaaaaacaatatctgtgctaagatgctttgccccataaaggattgaaagtaaaagtgacagcgctatagcaaatggagaagtaatcaatatgatacgtgtccactgttttgaatacatacaaaaacctactctgaattagttttgtgtcaatttttcagcagccgctttcaggaaacggactttgctccaagctgtgccgccttgtgcgagagggtccactgagttgacatacacatggtcttctttgactgctttaaggcttttccagattggatttttctctaaatcttttaaggcatcaggtttatctgcattttcatcatcagaaaattggacgaaaatatggtccgggttcatttcacttaatttttctaatgaaatcagctcttgcgcttttgcagcttttacttcgttaggcgccttaaggcctaaatcaccgtatagtgtggagttgaaatacacctgttcagggtaaatgtaaatgttgccttgtctaattctaatgacaagcgcttttgaatctttcgctttatcgttgatttttgtttttgtttcttttagatcttgttcatagtctgcaataattttctttgcttttttctcttttccggtcagctgggcaagcagcatcatgttttccttccagtttgaagagatatgagaaactgggatcgtcgtgcctgctgtgctgattttttgcagcgttttttccggaaactttgttgaagcaaggataacatctggcttcatttcaagaatcttttcaatatttggctccattttttctccggttggttcggctttatcagtgatgtctttgaacatatcagggaatttgccggagaatgaaattgcgccttgcggatgaacgtcaagcaatttcgcgtcttccattgattcaacgcttcccgtaatggcgattttgtctgtcggtacagttacttcatatgttttatcaagatattcaattttcttcttctcagatgctgtgccgcttgccttgctggcagttgattcatttttgctgccgcaagctgccgccgtcagcgcgagaagcaagattaataaggtaagagatatctttttcatctatagagcctcctgttcaattgataactattatcaattggaattatagagaatgaacagatataacaccatggacaaattcctgatttatcatggacaatctccggatagtaaagaaacagtttgctgaacgatgcgttcgtgcccgcaagctgagtattcattccacgggtcaagggatagaagataaacacggttatctcgtaccgcgcttaggttttgccatgcttctgtctgctgtaattgctggtagtaagctatggtctccggctctttaaaaagaaaaagcatcatacagtcagcttggtaatttgcgatattttctaacgaaatcgcttgttctgaaggtgtgtcagccgttgttgccgagctgaatcctaaatccccaaagaaaacttcgcggacacttcggttatgtgccagatagaagttttgcttatgcagcctcaaaaagagaaaacgcagcccttgaacgtgctgaagtgtttttttggcggctgttgtctgctggtcataatccgctagccacttttctgcttcggactcctcctttaaaaatgaggcagtttgcagaaagtgggttctccagctttcttctgaaggaaggtacatgacttctgcgatgcgattcaggcgatcttgttcttctggagaaatagaatccatgctgacaatcacatctggttctgcctgcgataacgtgtacaggttttcttcccacttttcattaaaccggtatgcactgagctggacgggtatatctgtcgaataatgctgatagtagtaagacgtccatttcggatgcagagcggccgcaaaaggtatgtggtgaagagggatgagatggcccattgtgccccttccgtatgcggcgattttctttcggcgttttttcatatagcttgtaggtgaacagcctgtatattttttaaagattctgctgaaataaaattcatcttgataaccggtttggtgtgcgatttctttcaatttgcagtttgattttgccatgagccgttttgcctttgtgattcgtgttttcgtaataaattctgttacgctctgtcctgtccattttttaaagctttcactgtagtgtttggcactgattcctgccatttgcgacagctgggcaagcgtgatttttgtatcggcatgtgtttcgatatagtgttttgttttttcgattgctgaatgtgtatccgtttgatcagataaactggcagtaaaaagatcataaatcaggctttgtacttcaatcacacattttagctgagaaagctgagacgattcattccatagtgcggcaagctcttgaagccggactgcaagattttcgatatgtgaaacattcataagcttcagtttggctaattccgattctgtgcacggtgtgtaaatatcttggccggcttccttgatatagctttgaagcctgatcagacaggcatctatatgtccatcggctgctggcataaagccaaaggtctcgttaggcggacaaacataaagtgtctttttttgcagaggattggtgtttgttccgatcgaaatatagccgtttccttttaaatgaaaaatcagcacgaatgaatcggctaattgctgttctgagaagagatcacttgtcttttttagatattcaatttgtatcggttgataaatcactgcattttgcacgagtagaccaccttttcagaagctttcaattgataatcattttcaataaaaattgtaccaaataaatgaaagttttcctatataaagcgggtgggtttttagcatgaaaaaaacccttacttatgtgtaaaagtaagggtctttcgttcagtaagaatatgttacacgtgtaacatacgatgcttacgttctaataaatgagatatttttttcttgttttgctgaattgttggagtgttttttcatagctgtttatgatgccctcaaccgaagttccattttcaatttttgtcctgatccagccgttgcctgccagtttatcgaatgaacctgttgacaggaactcaaaatcctcaggatagagatcgtgtatggttttaatgactgaaagacccgttttaacggcttcaaacttatctctgtctgtcacatagagctgcacaccgtggcaaagcgttccttgatgtttagaaaacgtcggtgtgaaggatgctgccctaaatgttacgcccggcaaatggaggctgtttaatgtttcttcaagttctgtgcttttgataaagggagctccgatcaattcgaatggctttgttgtccctcgcccttcggatatatttgttccttcaatcagcccggttgcaggataaacaaatgtgctttccaccgtcggcatgttaggcgaagggaggacgaaaggcaatcgggtatcgtcaaaatccatttttcgtttccagtgtttcatttttaccactgtaagatcggcatcaatatcaaattctttgttgaacagtaaagccaattcgcctatcgtcatcccatgcttcaatggaatgggatacaatccgacaaatgaggcgtattcaggttctaagattggcccttcaatatgattcccgccttggggattcggacggtctagcaccataaatggaatgccgttttctttagcggcttccattgcgtatgccattgtataaatgtacgtgtagaaacgggtcccgacatcctgaatgtcaaacattagaatatcgacatttttcagcatttctggagtcggttttttcgtttttccgtagaggctgtatacgggaaccccggttttttcgtcaatgtaagagcctacttcgtctccagcctgggcgtcaccgcggacgccgtgttcagggccgaataaagctgtcagtttgatatctgggttctcgtaaagaatatcgacactgcttttcagagatgcgtttactccggttggattggtgatcagtccgatgcgttttcccttgagctgttttttatagtctggcaagagcgtgtctatcccagtctggactttaggttttttagccgtttgattctttgaatcgggtgaagcagaggcagcggttatcgttccgaacatcatgagccctgtcagaaaagcgaatattgtttttctcatgtgtccctccttattaaagcggtcttcccgttttgatatttaatccgtagccatatggataaagggtgtcccccgggttcgtgactgatgggatgttaactggaagtgtgcctttaggttttgcctggccgaaaatcgccatcactccggccggaatattaggttgaagataacggccatttgcgtatcctttaaagccatagactgcaatcagtgcctttgcttcttcgaaattggcggcatcatatgggttgcgcaggctcattaagacaaatggtttgttgtgctgcagtgcggctttcatgacagctctcggaaacacggtggcccatttgcttgaatctgatattgtgtcgtcgatgacaccgtcgttgacgacagggtcatttttgacgacataggagccggttatgatataatcagccttttttacttgttttgcatgctcggcattaaatacttggttggcaaaattcattttgtcgacagatacgggtttgattttctttcgcttgatgagatcgtgaatggtttgttcgattgaagcagtttgttcttcgtaaggtgccacaattaagattcggctgccttttttaggcttgaacggcaaagtgtgctgttcattttttaatacagttactgctttttcagctatttttttctctgttttcaggtgctgctggcttcctacgatttttttggctttggctattttttcttttgtactgtcgctgtttcgtgctggatacatgccgcgttttattttcagggaaatgattctttcaactgatttgttgatttgttgttcaggaatatccccgtttttcacggcttctttcaaagcttgaatgacacgtgcgaatttctgttcttctttcattgaagtgactgaggctggcattaatgcaatatcgacaccagcttttacggccatgaccacagcctcctcctgtccgaaatgatctgcaattgccttcatattgagcgcatcggtaacgatgaccccattaaagcccatttcctgacgaagaagacctgtcatcactttttgcgaaagtgtagctggaaccagaatgtccgatccatcgagtttgcttttgtatgtggtgtcgtcgaaggcagggaattgaacatgggctgtcatcaccatatcagcaccagcatcaattgctttttgaaaaggataaagctcgacctcacgaagccgttcttggccatgggaaacgagcggcagtccataatggctgtcaacgtccgtgtctccatgtcccgggaaatgtttgagggcagacgcgatatcctgccgctgcaaccctttcatcgtatatagaccgaggcgtgatgtcagttctcgattggagctgaatgaccgtacgccgattacaggattatcaggattattgttaatgtccacgacagggctgaaatctgtattgatgcctaaggcagagagctctttcccgatgatgctgccggtctgatacgcattgattctgcttctggctgcgcccagcgccatattccctgggaaattagtgccctcccctaacctcgttacaatgccgccttcctgatcaatactcagcatgagcgggatttttggacttgccttttggtaatcgtctgtcagttggacagtttgttttgttgtttttacattttctgcaaaaaggatgatgcctccgaattgatatttcttgacgaggctggcgacttcatcattcatttctgtaagggcttgcggagaggactcgccttccttttgccaatttctaaaatcaggcatcagcatctggccgagtttttcatctaacgacatacgattgacaatctgattggcatcgattgaacgtttggatgcagaggcttctgtctgtctggccccgaaaaagcatgaaagaaagagaacggctgaaaggataagcggaaagacaggtctcatagaaacttcctcctatcgtctaatcattcactccatcgcttcataaatcgcggttatgacacttccataactgcctgttgcaaattgatcaccctcaaagacgtttggattttcttccggatcaataactggtgtatgctttttatttgttaacaatgcgatgcctaaattgtatgctggatcaataattgtaactgtccctgtccagccggtatgcccgtaagcattttcactggcatgagggccaaacatccattccacgcttttacttccgttccgcctccagccaagagcgaatgtcgggtctgttgctgaaggtgctgtaaacaggtcggctgttttctgatcaaataaagaaatgtttcggtatgaacctttgtttaacatgacttgcagcagtatggccatatcatctgcatttgagaacaatccggcatgcccagacacgccatccattgagtaaaacgctttttcgtcatgcacctctccttgcagcgtgtttgtgcggatgttagggaattgaataacgccgtcacgtgtattgcccattcgttcagtagctgcgaactgtttcggtttaaagcccttttgcagcggattgtacaaggtatgcttcagcctgagcggtttgtagagctcttgctccgtgtagacatcaagcggtttgccagtgagtttttcgacaatacacccaagtagaatatatccaatgtcactgtatacgtgttttgtcccggtttgataatcgagcggaattttcgtcaaatattcaatcgttttgtcccgttcttgggaatagtacttaccggctttttccggcgtgtaaaagtaaaagcttgatgggagtcctgattggtgctggaggacatcgatgacacgtatcttgtcttttccttttatgaggtcacccggctgatccttgaaacccggcaaatatgcagaaactttttcatagacgtcaagttttccttggctgactaagcgctgcaatgcaaaatttgttgcgtacatttttgtatttgaggctaagtcaaacatcgtgcgggttttcattttggccggacggcgcagcagttctgatccttcgtactttttactgtagccgtatgctgctttttttatgatgcgtccatccttcaccaccacaagaacggcgcctggaaatcctgctgcaatatcccgttctatcatctgatctaccttctttagcttcttcgtcgagaattgtgcagtttctgcatttatggttttcggctcaaccaagttgtctgctgtttgtgcgaaggtttcatttggcgcgaatatcgatagggttaaaatggcactgaatatgaacagtgtctttgttttcacaggctagcccctttctgtgcttctatcccgtttactatccctaaaacagaaacaatttaatcgaactgagaagccatttcatctttatatccgaatgcataggtcaataaaaagccggccgcgtaggaaataaagagcccaacgatatacaggatgatttgcgaaggcaggactagaaaggaaagcggcagtccggagacaccaatcgcaatggtggctacttgaaaataagcttgaaaggcgccgccgattccagctcctaaacatgctgttaaaaacggacggccaagcggcagcgtgactccgaaaataagcggttcaccaatgccgagcagtcccgatggaagcccgccggcgattgctttcctcagtgttgtttttttcgtcttcacgaaaacggcaaaggccgcgcctacctgtcctgcacctcccatagccaaaatagggagcagaggatcattgccaattgaattgatcagttccatgtgcacaggcgtcaagccttgatgcagtccggttacgacgagaggaaggaaggttgcgcccagaataaagcccgcagcgatgccgccgatgtccaggatggacagtaggccggatgtaatagcatcagaaatgaatccgcctaaaggcataaatacgacatacgttacgattccggtgattaacagtgaaacggtgggtgtgacaatgatatcaagtgattgaggaataaaacggcgaataaattgttcggtgtaagcaatgaatatggctgcgaaaaggacgccgatcagacctcccctgcccgggagaagctcttctccaaataaactgatttttgcgatctccggattgataatcaagatcccggccaaagccccaagtgcgggtgtcccgccaaattctttcgaagcgttaataccgacgagaatgccgagataagtgaacagccctgatccgatgactgtcaggataatcgcaatttgtgagtctgcagagagccagcctgcttgaataattgctttggtaatcccagtaattaaaccggaagcgactagagcgggaataagagggataaaaatgctggcaattttacgtaagaaaagtttaaaaggagtggcatttttccgattgatatcggctttctttttggccgctgcttctttgacatcggcaccttcttctgctgacacgagctttgagaaagcagctgtaacatgattgacgactcctgtgccgaggataatttgtaaggtttcagcttcaacgacccccaatacgccgtcaagctttcttaaaccctgagcatctgctttgctttcatcgtaaggcgtaatgcgcaggcgtgtcatgcaatgcgtatatgaagaaatattggattttcctccgcatagctcaaggattttctgtgcgagatgatggtagttattttctttgctcattaaaacccctccccttcaagatgccttatttttttctcatagattggatggctgctctcgttttatcgatataaccggttgtcgtttcatactgctcagccgccatgcctaaaaacaaaacatcaattataaaaagctgggcgaggcgggaggaagtggccgcacttcgaatcaaggcttcattggaatgggctgtatacaaagggacatcagccagtgcggagacggatgtctgactgaattgtgtgaggctgatcgttgtgatgcctttttccttggccatggcaaacagttcaatgatttcctgtgtctctcctgaaaacgaaatggcgaatacgatgtcgtctttatctgcatttgcaattaaagatgccacaagatgagtgtctgtaaacgcggttgcttgtttatgaatgcgaagccacttttgctgggcgtccttggcgacaatgccggaagcccccaggccgataaaatgcacggtatgagctttgagaagcagagaaaccgctcgttcaagctctttgtagtccatcaggtctgaagtatcctgaatggcttgaatggcattgccggccgttttttcggaaatggagggcagcggctcgtggggaacaatatcccggtagccctgaaacgtaggctttgccagatcgcccgctactctcatttttaaatcttgaaatccttttaaaccgagtgatttgcagagcctgatgacggcagcgtcacttgaattggctaaggcgctgatttcgttgaccgtgctttcgattgctttgtggggatgggctaggatataatctgcaagtttgcgctcggatggagggagcttatgcttcattgattggatgatggctaaaccgcctgtggccattctagttctctccttatcatggatggtaatgttcgattgctttgtcaatgaaaccgtttgcttcatcgagtaatgtctttgcttgtttctgatctgtgcttgttttgagcatgacgattgctgttttgacgtgatgatcggcttgttccagagtgtatctggctgtgtcgtatgaagcgtttgtaaggctttggataatgctgatggcgcgttcttttagttttttgttgctgacgttgacgtctaccatcaagttttcgtaaaccttgccgattttgaccattacagcggtagatatcatgtttagaatcattttatgagcggttgcggctttcatacgtgttgatcctgtaatggcctcaggtccgacgacaacctcaatgctgtgatccgcatccttgctgatggcggaattttcattgcaagtaagggcgatggtgtgtgctccgactttgcgggcgtatcttagggcgcctgcggcgtagggtgtgcggccgcttgctgcgatggcaatgacggtgtcatttgaagtgagctgtatgtttcttaaatcttcagctcctgcttcatcactgtcttcaatgccctctgctgcctgtaaaaaggcttcggggcctccagctatgattccgatgacctgatctgggcttacgctgtaggtgggaggacattcaacagcatccatgacgccgagtctgccacttgtgccggcgcctgtatatatgagccggcctccattttgaaacgattcataagcgcagtctacagctgttttgatgtcggggagaacctcttgaacggctgcagcgactttcatatcttcgttgttgatcattttgaggatgccgagagtgtttgctttgtggatttcaactgtttggctattgcgtgattccgttgtgagacggtgaaggtttaatggttctgacatgaggatgccccctgttttaaaatgatatatctcaatattcagtatattcatttctgttatgatatttcaactatgtttttgaatttttgaaattttatttcactcaagtctataagaaatgatgaaggatcaactgttctccaagcgggccgattcttcgccgtcctttatcaaggaacccgcttttcatataaaggtgttttgcgcgtatgttcagatgattgacggccaagatgatttcgtcgcaccatggaaaatatccgctcacaaaagcgggaagcaaaagcatggcttttttcgcatagccttttccgtgatgcacagcgtttaaagacagggagctgagcagtaaagcaaatggattgttagaataagaagcaagcgtttcttttgatgcatgtaaaatgaaaaaaccgactggaaggtcgtcttttaagatgacaaccgggtatcggtcctgtatgcccagagcctgagacagcacctctttcgggagggaggtaaagcgtttgtcatcgttggtgagcgtgaatgattgaagctcgggcaagtgttcaggcttatagaaggataaagaaatgtcttgagtcatgtggtggcctccttacaatatgtcgtcaagctcgttttccgaaatgacgcggtagcccgcttgttttaacagtgcggcggttactccgctgccggtgatttttttaccagagaatgtgccgttatagataaaaccgcttccgcaagatggactgttttcttttaatatgacggcagaagcgttgatttcttttgcgtaagccaatgttttcgcggcgccttccatatatagttctgtgacgtcttctcctgaagctgtcacgattttcgctgttccattgagaacatcctcgccggtgcctcctatgatttctgcgggttcgcgtggggtagagaagccgccgagaagttcagggcaagccatgactgctttcttttcatcgacgagttttctgattttctccgacgctgcgtgagagccgttatatctgcattcaatgcctccaaggcaagaactgactagaatcatattgggttctcctctcttgctttacttgtctctatcataaaataaatggctttagttgggaggctttttcagttaaaaaaggagttaaaaagtttgaaaataaaaaaattaatttttctctttacaaacagggagtgacctgtatataataacttttgtcagctcgacgagaacacaacggcccgttggtcaagcggttaagacaccgccctttcacggcggtaacacgggttcgaatcccgtacgggtcaccatttggaggattagctcagctgggagagcatctgccttacaagcagagggtcggcggttcgagcccgtcatcctccaccatcttgccggtgtagctcaattggtagagcaactgacttgtaatcagtaggttgggggttcaagtcctcttgccggcactgttttttcaaaattttatgtggaggggtagcgaagtggctaaacgcggcggactgtaaatccgctccctcagggttcggcagttcgaatctgcccccctccaccattattgggctatagccaagcggtaaggcaacggactttgactccgtcatgcgttggttcgaatccagctagcccagtcacagacacctttgatcaaaaggtgtcttttttcttttcgggaaaatcattccaacttctaactgttcagtctgtataataattttaaaaatatgttaaggtagtttattcacgaattaccatctacaccctgccaaaaatttgataaacttattttataaaaaaattgaaaccttttgaaacgaagctcgtatacatacagaccggtgaaggcagaggttagataaatatggaaatgatgattaaaaaaagaattaaacaagtcaaaaaaggcgaccagaatgcatttgcggacatcgtagatatttacaaagataaaatttatcagctttgctaccgtatgcttggcaatgtgcatgaggcggaggatattgcacaggaagctttcatcagagcgtacgttaatatcgacagttttgatattaaccggaaattttcaacttggctttatcgaatcgcgaccaatttgaccattgaccgcattcgcaaaaagaagccggattattacctcgatgcagaggtggctggtacggaaggcttgaccatgtattctcaaatcgccgcagatggtgttttgcctgaagatgcagttgtgtcgctggagctctcaaacacgatacagcagaaaattttaaagcttcctgacaaatacagaacagtcatcgtattaaagtatattgacgaactctcattaattgaaatcggggagattctaaacattcctgtggggactgtgaaaacgcggattcacagaggcagagaggctcttagaaaacaattaagggatctttaagtggggtgatgaaatgagctgtcctgaacaaattgtgcagcttatgcatatgcatcttgatggagatatccttccaaaagatgaacacgtattaaataaacatctggagacatgcgagaaatgcagaaagcatttttacgagatggagaaatccatagcgctcgtacggagcacatcgcatgtcgaagcccccgcggattttaccgctaatgtcatggcaaaattgcctaaggagaagaaaagagcttctgtaaaaagatggttcagatcccatcccgttatcgcagctgctgcggtattcatcattttgatgggcgggggtttttttaacagctggcataatgaccacaatttcagcgtgtccaagcagccgaatcttgtggttcataaccatactgtgaccgtgccagaaggtgagacggtcaaaggtgatgtcactgttaaaaacggcaagctgattattaaaggcaaaatagacggggatgtaaccgtcgtaaacggcgaaaagtatatggcctctgctggacaagtcaccggtcagattgaagaaatcaatcaattattcgactggacatggtacaagatgaagtctgcggggaaaagtgtactcgatgcattcgatccgaacggagaagagtaaagcgcgttagccgctttgctctttttttgtgggctgagagggctggcacatttcacttgctaaatcgaaatgtggtataatgggctcgctatgtaaagtacatatgcgtaacacgtaaaacacaaaatacgaaatgactgaaatcttggaggacgaggaaatggcttttgaggatatcccttttttgcagtacctcggcaatgccgttgatattctccttgtttggtatgtgatatataaattgattatggtgatacgtggcacgaaagcggttcagctgttaaaaggaattgtagtcatcgtgcttgttcgtatggccagccaatatttgggcctcagcacacttcaatggctgatggaccaagcgataacatggggatttttagcaattattattatttttcagcctgagctgagaagagcgcttgaacagctaggccgcggccgctttttttcgaggagcggcacgcctgttgaagaagcgcagcagaaaacgattgaggccattacaaaagcgatcaattatatggcgaaacgccgtataggcgccttgcttaccattgagcgggatactggaatgggggattatattgagaccggcataccactgaatgccaaagtcagctctgagctgctgatcaatatttttatcccaaacaccccgcttcatgacggtgcggtaattatgaaaaataatgaaattgccgcggccgcctgttatctgccgctttctgagagcccgtttatttcaaaagaactgggcacgcgacacagagcggctgtcggtatcagtgaagtaacagacagtttgacgattattgtgtctgaagagaccggcggcgtcagtgtggcaaagaacggcgaccttcacagagagctaacagaagaggcgctgaaagaaatgcttgaagccgagtttaagaaaaacaccagagacacttcttctaaccgctggtattggaggggcaagaaaaatggataaattcttaaacaaccgctgggctgtgaaaatcattgctctgcttttcgcgctcttgctttatgtggcggttaacagcaaccaagcaccgacgccgaaaaaaccgggtgaatctttctttccgacatcaacaactgatgaagcaactctgactgatattccggttaaagcgtattatgatgatgaaaattacgtcgtaacgggtgttccgcaaacggttaatgtcacgataaaaggctcgacaagcgccgtgaaaaaggctcggcagaccaaaaactttgaaatatatgctgatatggaacatttgaaaaccggcacacataaggttgagcttaaggccaaaaacgtgtcggatgggctgacaatctcaattaatccgtctgttacgacagtgaccattcaggaacggacgaccaaaagttttcccgtagaagtggagtactacaacaaaagcaagatgaaaaaaggctattctccggagcagccgattgtcagtccgaaaaatgtgcagattaccggatcgaaaaatgtcatcgataatatttctcttgtaaaagcttcagtgaatttggaaaacgcagatgaaacgattgaaaaggaagcgaaagtgactgtctatgataaagacggaaacgcgcttcctgtcgacgtggagccctcggtcatcaagattaccgttccggtgacaagcccgagtaaaaaagtgccctttaaaattgaacggacaggaagccttcctgacggtgtcagcatagcgaatattgaatccagccccagtgaggtaacggtttacggctcacaggatgtgttggattctcttgaatttattgacggcgtcagcttagatttaagtaaaattaacaaggattccgatatcgaggcagatattccgcttcctgacggtgtcaaaaaaatctcaccgtcaaaggtgactttgcatatagaagtcgacagtgaagcggatcagaagttcgagaatgtccctatcaagactgtagggctgagcagctcacaaaacattgaatttcttgatcctgaatcacaagcgatagatgtaacggctaaaggctctcccacgaatataaaaaagctgaaaaaatcagatattgaattgtatgtgaatgtttcagatttagaggacggggagcatagcgtgaagcttgaagtgaacgggccacagaatgtaacttggtccttggggcgtaaaaacgccaaaatcaagctgacgtctaagaaaagcaatacatcaacgaatgataacagcagcaatacatcagggaaccaggacacagataaacaaacaaatgatcaaaagaacaatcagcaagaagatacaaagaacactgataaaaacaacaacgatcaaaaccaagacgaaaataaagatcaaaaccaagatcaggatgaggatgaatccactgcgaattcacaatcctcatcggaataaaaaaggagcgattataaaatgggcaagtattttggaacagacggtgtaagaggtgtcgccaatagtgagcttacacctgagctggcctttaaagtcggacgtttcggcggttatgtgctgacaaaagacaaacaacgtccaaaagtgctgataggccgcgatacacgcatctccggccatatgctggagggagcccttgtcgccggacttttatccattggcgcagaagtcatgcgcctgggtgttatttctacaccaggtgtatcttatttgacaaaagcgatggatgcagaggcgggcgtcatgatttccgcttctcataacccagtgcaggataacggcatcaaattctttgggggagatggatttaagctttctgatgaacaggaggctgaaattgagcgcctgatggacgaacctgaggataagctgccaagacctgtcggagcagaccttggacttgtaaacgattattttgaaggcggacaaaaatatctgcaattcttaaaacagacagctgatgaagatttcacaggcattcatgtggcattggactgtgccaatggcgcaacgtcatccttggcgacacacctgtttgctgatttagatgcagatgtttctacaatggggacttccccgaacggattaaacattaatgacggcgtcggttcgactcatcccgaagcgctcagcgcgtttgtcaaagagaaaaacgcggatctcggccttgcattcgacggtgacggcgaccgcctgattgctgtcgatgaaaaaggaaatattgtagacggcgaccaaatcatgtacatatgctcaaaacacctgaaatcagagggccgtttaaaggatgatactttggtttcaaccgtgatgagcaacctcggcttctataaggcgctcgaaaaagaaggcatcaaaagcgtacagacagctgtcggcgaccgctacgtagtagaagcaatgaaaaaagacggctacaacgtcggcggagagcagtcaggacatcttattttccttgattacaacacgacaggggacggattattgtctgctattatgctgatgaacactttgaaagccacaggcaagccactgtcagagcttgcagctgaaatgcagaagttcccgcagctgttagtcaatgtgagagtgactgataaatataaagttgaagaaaatgaaaaagtaaaagcagttatttctgaagttgaaaaagaaatgaacggcgacggccggattttggtgcgcccttcaggaactgaaccgctcgtccgtgtcatggctgaagcgaagacgaaagagctgtgcgatgagtatgtcaatcgcattgttgaagtcgtccggtcagaaatgggattagagtaacgaagtctattatcagagagtgaacaagacaagcgaggtttacataagataattgtgagacatacggcaaagttgtttaaaaaacaattgaccgtttatgccacatgttgtaaaatcaagcttgtcttgttcttattttctcaataggaaaagaagacgggattattgctttacctataattatagcgcccgaactaagcgcccggaaaaaggcttagttgacgaggatggaggttatcgaattttcggcggatgcctcccggctgagtgtgcagatcacagccgtaaggatttcttcaaaccaagggggtgactccttgaacaaagagaaatcacatgatcttccaaaaaacatgtaggaggggacgattgaaagtccccttgaaatttgactttcttcgtctccttttacaatcttaggaggaagaaaaatatgtgtggaatcgtaggttatatcggtcagcttgatgcgaaggaaattttattaaaagggttagagaagcttgagtatcgcggttatgactctgctggtattgctgttgccaacgaacagggaatccatgtgttcaaagaaaaaggacgcattgcagatcttcgtgaagttgtggatgccaatgtagaggcgaaagccggaattgggcatactcgctgggctacacacggcgaaccaagctatctgaacgctcacccgcatcaaagcgcactgggccgctttacacttgttcataacggcgtgatcgagaactatgttcagctgaagcaagagtatttgcaagatgtagagctcaaaagtgacaccgatacagaagtagtcgttcaagtaatcgagcaattcgtcaatggaggacttgagacagaagaagcgttccgtaaaacacttacactgttaaaaggctcttatgcaattgctttattcgataacgacaacagagaaacgatttttgtagcgaaaaacaaaagccctctattagtaggtcttggagatacattcaacgtcgtagcatctgatgcaatggcgatgcttcaagtaaccaacgaatatgttgagctgatggataaagaaatggttatcgtcactgatgaccaagttgtcatcaaaaaccttgatggtgacgtgattacacgtgcgtcttatattgctgagcttgatgccagtgatatcgaaaaaggcacgtaccctcactacatgttgaaagaaacggatgagcagcctgttgttatgcgcaaaatcatccaaacgtatcaagatgaaaacggcaagctgtctgtgcctggtgatatcgctgccgctgtagcggaagcggaccgcatctatatcattggctgcggaacaagctaccatgcaggacttgtcggtaaacaatatattgaaatgtgggcaaacgtgccggttgaagtgcatgtagcgagtgaattctcctacaacatgccgcttctgtctaagaaaccgctcttcattttcctttctcaaagcggagaaacagcagacagccgcgcggttctcgttcaagtcaaagcactcggacacaaagccctgacaatcacaaacgtacctggatcaacgctttctcgtgaagctgactatacattgctgcttcatgcaggccctgagatcgctgttgcgtcaacgaaagcatacactgcacaaatcgcagttcttgcggttcttgcttctgtggctgctgacaaaaacggcatcgatatcggatttgacctcgtcaaagaactcggtatcgctgcaaacgcaatggaagctctatgcgaccagaaagacgaaatggaaatgatcgcccgtgaatacctgactgtatccagaaacgctttcttcatcggacgcggccttgactacttcgtatgtgtcgaaggcgcactgaagctgaaagagatttcttacatccaggcagaaggttttgccggcggtgagctaaagcacggaacgattgccttgatcgaacaaggaacaccagtattcgcactggcaactcaagagcacgtaaacctaagcatccgcggaaacgtcaaagaagttgccgctcgcggagcaaacacatgcatcatctcactgaaaggcctagacgatgcggatgacagattcgtactaccggaagtaaacccagcgcttgctccgttggtatctgttgttccattgcagctgatcgcttactatgctgcactgcatcgcggctgtgatgttgataaaccgcgtaaccttgcgaagagtgttactgtggagtaataaatgtttaacccctttggataagattgtctaaaggggtgtttttatgtccaaaagagaaagaacgtctacagtggaaaaatggattaaagaaggtgatgggacaggactcgactatctatcggccatggctatagatttaagatgtttccacattaggtcggtcaatcaggttaaaaggcattaagacttttgcctaactgagttttctaatgttaatacagatataagagagcagttcctcattatgaaacgcttttgatagcagttggaataaagcatgctagaaatccgaaaaccggagagcctattggaatgataacgtgtttttttattgtcaattaataaaggcaaaagaattctagaagtcgcacttacaatgtacttgtgggccttaggttttaaagctcattctttttttattgagtacattccggtttaagttgaaatgattcagtaaaggacacgccataaataaaaggtagcgtatgattgccattctttccatggaaccgatatttctaagatttcatctttcgtaggctttcgattcatattacgtaatatttttatcgaacgaattagacccacatcatcgattggaaaagctgtcgggaacctaaggcagcgcattagaacataattggctgtccaaggaccgattcctcgtattttaattaagtttttttcagcatctttaaagttcattttcattaatttttccctcgataattccccacttgccattaatctggctattccaatgatatattcacttttttttaccgtcattttaatatctgccaggtcggtaggggttaaccgtgcaattcgctcgtacggtgggaacacccaatactttttaccattccattcaatagaatcgccaaatgcttctacaaattgcttctttaaggagtacgcgaaggctaagttaatttgttgccctaaaactccccaacataaagcttcaaataaatcgggaatgccgatcactcgcaacccataaaattttcgggcaggcattttaagtaatggatctgcttttgccatttcataaaatggagttaaatcgttatcaagatcaaaccattcatgaatatattttacaatctcttcccgtttccactgctcaacaggtctagaatcgtttaggaattgaacaatcatttgtttattattgattacgcttacctgcactaaggaccgaatttccccaatggctataacttttgtaatgatattgttctctatttcatacatgcattcatttttttccctggttaggtagccaaggttcgcattcatgtcgaaaatttcaggtaatgtaatgacaataacatcattgacttcatgccatgtcactttttcattctccttatcttaaataattataagaaaactcacgctggttgaaattagtttatcacataataagctttactcattttgttatcttgctattacattctaaccaccttatttttttctatttatgaggttatagtgttagttatcaagaatgctaaacgggagtggattaaaatcgcccaagatataaaaacgtgtgtcgaaaacgtaaattgggattcaagtcaaaatgaattagatgagcattgtaaggaggggtgagataaatgccggatagtatcaataacggacataaagagagccatgatcagagaaccttaaatgatgtagaaatgctaacaaatgaaaagtggcatgcaattataaataatgatgcagcgtacaataatcaatttttctacgctgtaaaatcgacagggatattctgtaaaccatcctgtaaatctcgcgttccgaaaaaagaaaatgtatgtatttttccaaacgcagaacaagctctccacgcaaattttcgcccttgtaaacgttgcaagcccactaatgaaaaaatgcctgatagcgagtgggttgatctaattactgaatacattgataaaaatttcacagaaaaattaacgctagaatcgttagcagatatttgtcatgggagtccgtatcatatgcatcgaacatttaaaaagattaaaggcattacgctggttgagtatatacaacaagttagagtacacgcggctaaaaagtatttgattcagacaaataaagcgattggagatatcgctatatgtgtgggtatagctaacgcgccttattttattactttatttaaaaagaaaactggacagacaccagcacaatttcgtcaaatgagtaaaatggaggaaacgtacaatggaaacaaataaaccaaccctttattggtctttactaatgttcaagaattgggatttttatattgcttcaactttaaaggggcttgtgtttgtaggttcacagaacaaaccaatcgaggaattgttcgaatgggctaagaaacgctttccaggaagtcttcttgttgaagatgatgataagcttgaaccctatgctgttgaaatcactcaatatctagaaggaaagcggaaaaactttactgttccagttgagtacgccggtacgcaatttcagctagccgtctggaatgcactttgtgaaattccttatggacagacgaaatcctattccgacattgcaaatgatataaataaaccagcagctgttcgtgctgtaggtgcggctattggggctaatccggtattaattactgtaccgtgccatcgtgtaataggaaagaatggctcattaactggctatcggggcggatttgaaatgaagacactgctcctcgatctggaaaagcgagcttcatctgaaatggatgttcctcattgaaagtgaatcatctataatgggttggattcttttagaggaaagtaaagaccagtttactgataaacttgacaacttttaaaatttagcatatcttatacgtaacttaataatcgatgcagatgtttatttttccttttaaaatatgtaggcctttagcattcttttcatatttaattttaaatattgataggatgaaaaagtatcctaataaaaaaggaagagaacatgagtcgatttatttgataatcaggactatattaaaggaaatgaaaacatagcataaagtaaagaccaataataaggtagcacttcaaaaaacttcgctgaagttagttgaagtgaagccgacaattttcaggattcaatgatctaacataatcattgaaattttgaagttgtcggcttttttgttggaaaaaaatagagataaataaaaattgaaataaataatagacaaatatgatctgattgaaagatcttttgaccaataatgagttttaaaaaagggagaatttagaatgttagtttcgctgagtttgtcatcattattaacattattttttattatgcttatggcttctgggattagtggactattgtttttacatccgcgagtacccttgagttttgttcgcattcatattgggatcttggctttaccacttttggtttccttactgattcttgccgatagtggtgtgagcggaaatgttggcccttggcacttagattccttagcttgtttaatgactttctttgttcttgcaattggattcatcattcagcgtttttctgtacgttacttaatgggggatcgatcttatcgaaaatattttacgctttttactttcacaacaggagctgcttctatgacatggttaagtggtgatctccgcttgatggttctattttggggagcaactcttgttggtttaaccttacttataaggttaaacagtgcttggcaagtggctagtgaagcagccaaaatttctggccggttatttttgttaagttggttttctttgttttttgcgatgatgtggctttttcatgccacaggtcaatggcagttatcattggttgtaacaaatgaaagtttagctgggctgggagaatgggagagaacagggattcagctattgattgtactggcggtgatcattcctgcagctcaatggccgttccaaagatggttggttgagtctattgttgctcccacccctgtttctgcaattatgcatgcaggtttagtaaatgctggaggaataatactaactcgattttcacctctatttcatggtggtatcgcttcgattattttacttctgcttgctggcatttctgtattgattggaactggaattagtttagttcaggttgattataaacgccagttagtaggctccacgattggacaaatggggtttatgctcattcagtgtgcattaggcgcctatatagcagccattattcatcttattttacatggtttattcaaagctacgttgtttctacaagctggttcagcagtagggcgtcatgaagtatcggctcgcactaatgaaagaacatcctatttatggatcatggctggtcggattttatccttagttataggtgttgctttttggctcactgctcctggagacgggtatcacttaatcagtgcgctgatcttagggtggtcattgtccgtttcttggactcagcttgtcgcttttggagagggccgaattggccgaattgccggcttaactgttttaggaggagcagccctcgtatattttatcattcataaccttttctataagtggctgcatacaaccatttttcaaagtgttcaacctccaatgtcagctgtcatgattgtcgtatgtctcttactatttggcagtgctttaggtacgtgggttgctcgtcatcgttcttccgtttttttcgcggtactctatctttggttagttcgattaggtgaagcaaaaccaaagtcagtagagagtcacccagactaccttaaacaatatatttcataaggagctaatctgagatgggcattacatccgtattaacgaaagataatgtaaaaaagatagatacagatattgatgttcaagaaagggatcttaacgttttcattacatctgccagccgagtgattgcgccactttggcctatttctacatttgctgcacgtaatccgtggatgggacttgaaaaccaaccttttgatcaggttgcaagttggttgaaaaacactcgcgatgttgatatatatcctagtgcgtctatgatccgttcagcaaagaataaaggtgagattgatgaagattttgtggaaatggggctgcagcgttggcttgattcacattcctatcacatcccacgggacgtggcagagcgattttgtcatgctgcattaaagttagatcccctgccttccgaccttttatcatcacatgagctggagaaattagtaagtgaatgtagtggattggatcatatcgagaatgtgtttatgcaaccactaagttcgtatatagagaatcaagatggtgaaaggctagtcaatatactagatcatcatgtcattaagtggagtaaattatatcttgatgactctcaagcaggctggacaatgcctaatcgtgaggaaggtttttatcgtgcttggcagcatctcattcaatatgatccagcacttagtaaaaagcagcgagaaagggtaaaaggttggccgaaagaggcacatttggctttacaggaagctttattcgcactagaaatcccagagtcagaaatccagacttatcttgaaggtcatttactttcattacctggatgggcagggatgatgctttggcgctcccagcaatcgagccacgaacatgcactcctaacagaatatttagcggttcgaatatccatggagtgggctcttataaagccatacttacctttgactaatgaacgatctaagaaaaaaatttcaattgctccccttatagcagcttggattcattggggtgggcttacattagaagaatggtcacagatgacggccattgaacaaaacgaatatttatcatttgcctacagctttgatgagaaacttcgcaagaaactttggttagaagcttgggaacaaacgtacactgatcgattaagccagaagatcatctcgaaacaacgtgaaaccggcggtaaaaaatctgcattagctcaattagcattctgcatcgatgtacgatcagaaccttttcgtcgtcatctagaaaaagaaggcccgtttgaaacgattggtattgctggtttcttcggggtgccgattgcaacttgtgaacttggcagtaaacacagtcatgcttccttgccgatcatacaaaaaccgcaaaataaaataaaagagttcgcagatgaggatgtattcaaaaaatacaatcaacggaagcaagcaattcattctttaagccatacctttaaaacgatgaagcagaatgcgctttcgagcttactactgcctgagctaagtggaccttggcttactctgcaaatggtagcccgtagctttgtgccaagaaaggcgggtcgtttcattcgtaatctccgtgaggcttggttgcgcaaacctgatacaaaactctcgcttcatcatgatactacagaggcagaaatacctgtgggttttactgatgaagaaaaagtgaactatgctcgccaagcattaaaaatgatggggttaacagaaaacatcgcacccttggtcgtgatctgcgggcatggcagtcaaagcactaataatccttattccgcagcccttgattgtggtgcctgcggtggagcggccggtggattcaatgctagagttttagctgctttatgtaatctatcagaggtacgagaagctcttttagctgaaggaattcaaattcctgaggatacggtttttgcagcagctgaacataatacaacagtagatgaattacattggctttatgtaccagagctttccgaagctgcacaagaagcatttgaacaaattgaagccgtgatgccgaaagtgagacatcatgtaaacgcagaacgtctagcccaattaccgaatttccaatcgaagctaaaaaatccgaaggctgaggcaaaccgatttgcggaagattggagtgagatacgtccggaatggggactggctcgtaatgccgcttttattatcggtaaacgtgaactaactcaggattgtgatttggaaggcagagcctttctccataattatgattggaagcaggatgaaagcggtgaactcctagcaaatattattgcaggacctggaactgtagcccaatggattaatttacaatattacgcatcaacggtagcacctcattattatggcagcggaaataaagcaactcaaaccgttactgcaggtctcggcgttatgcaggggaatgcaagcgatttgttagccggactgccttggcaatccgtcatggaatcagatcacgaggcctatcattctcctcttcgtttattgatactcatccaagcacctagagaatatgtagaacggttattaaataatgattcagcatttctgcaaaaagttcaaaatggatgggtccgactggctagtcttgatccagaaggatgttgggaaagctggtaatgatgaatctaagcatttatcaaatggatttgttattcaaaataaaaatgataaacataaggaagaggtgtgctgtatgaatgtaaaccaaaataaaaaagtattatttttgacggatattgaaaacggtttggagcctattttacaagaagcgactaacacttctgcagagaatatgttgactatacaaagctatggtgccggtatttcacatccttatggagaaatcatgaggtctgttatttttgcgatttaccaggaagatgttgaggagatttttgtagtaggaacaaaagataagaagacttccgcaggtaatggactaactcaacttgaaacaatgaaagataaaatacaaacattggattatctttttcaaaattgcaagcctgaatttttaggtggtacggtcgatgaatggctaaatgaaaatagcagtgacaccattgaaaaaagtgttgatatgattcgacatcatcccctagtgccgtcatatgttaaagttagaggtttattcgttcatcataaggatggaaaaccctcaatcgcggagggtcctgatgctaaaacaggtcaagccatacctgatcattgcttgtcacgatgaaatacaggttcaacttctaaacgcacccatatatggagaaagcagttctaaggagattgtatgagcgctaatttaactgattttgtcacgaaaacaatagaggacatgaactcgtttgatcgtgaaaatatggaatttatgaaaaaactaattagaaaagcaattgatttttatcatctaaagtcttatgaagaagttgaggaaacccattcaggaaatgttcgatttttgcatgtccactctatgatggaagaaaatatgttatccaaaatgatagtggtcacaagaaacggtaaaactgatttggatattgaaggtgtatatgaaggatatgttgtaagagaatattaatgagacgaaatcacaaatagaatatgccaatttttttgctcaggagatgtattagatatgaaaaagtctaagggttctattgaatcagagatcagtaagtccattactcaatgggagaaggattatcttgggcgggggtctgtatctgttaagactgatatactgcgggacatgatcatcgtcaatttaaaagggattttaacaccagccgaatatgtagtttgtggatcaaaagagggtatgttatctatcaaacaaactcgttcggagttagttgaatcaggtatagaaggccttaaggatattatcttaaaaataaccggagaaaaagtgaaaagttttcatactgatttaagctcccggacaggtgaacgagtgatggtatttaaattatgtaatgatctagagaaaaatttggaaaagatcttataatctaaagaaaataaatgttaagacggtatggaatttgttgtgaattgaacataaagaactgccgattcttttgttttacaattatggtatcattgataacttttattcatatcctaagcggacataaagagatatcaattcatagtacactgttgtgttattcctgtcgaaagatctaacatccgctgttgttatgagcggatgtttttttacatctattttaaatacatgaatttgatgctggtgattagtcacttgaacaatatttgaaaacatccttgtcacctgccgggtttccccaagtgtttagtgacatgattatgagaccaatttcgtaaagcttgctgataaatttaagcggtgaacaaaattgatatgctgtcttcagtttcatttcacggaattagtcagagataaacctttaattaaatatatccaaaaaacggattgacatatcgaaatataacgatataataatcgatatggaaccaattgaagtattcaaagccttatcaaatgaatcaaggctgcaaattttgcaatggctgaaggaaccggatcgtcattttgcaccccatgaagggattgatatgaacacaatcggggtatgtgtcagtcaaataacagacaaattgaaaatgacgcaatcgacggcttcccaatatcttaccatccttttaagagccggcctaattaaggcggagcgtattggaaagtacacatattacaaaagagatgaagaagccattgggaaacttgctgactttcttaaaacagagatataaaaataaacatcaaaagatgtttatttttacaccatacatatcgacatattacgatgtgtttattttttataataacatatcgataattcgtgatatgtttattaataattaaggagtgaatgttttatgtctaacacttggaaaatttatattttagccattgtcagctttttagttggaacctcagagtacatcatttccggaattttggatcaaattgctcatactctcgggatcactttagctgccgcgggccagtttattaccattttttcacttgtatatgctctttctacacccgtacttatggcgttgacagcaagtatggatagacgcaaattgatgatgtatgccctaggtttgtttgtgttcggtaatgtcctggcttttgtattgcctggttatggatggtttattgcagcgcggatcattatggcgatgggagcaggtgtggtggttgtcaccgcattaacgattgccgctaagattgcatcggaagggaagcagggaagtgccatcgctacggtcgtgatgggatttaccgcttctttaatcattggtgttccgcttggaagaatgatagcagtagcattaggctggaagtctgtatttggagccattgctttgttgggattgatcgcaatggtcgttattttctttactcttccgcatactgaaggggataagcctgtgcctttgcttcaacagcttgctcttttcaaaaaacggaaagtggctatgggattatcaatcactttcttctggctcgggggatattctgttgcttacacttatttgtcaccgtatctcttgaacatctcaggtataaacggcaacttgcttagcggtgttttgcttatatttggaattgccagtttggttggatcaaagtttgggggatatagcaccgataaatggggagtgccctttacactcgttggcgggatgacgttgcatatcgtcacactgattcttctgtcacttgtcactcattcctatatcggagtgttggtgattctcatattatggtcgtttgccgcatggtccaccggtccgacacagcaatttcacctggctacaatagaaccggaaatgtcaggtgttttgcttagcatgaatcagtcaatgatgcaattcgccatggcggtcggcgcaggtataggaggggtttttgtggaaaacgtatcattggcctcgattacctgggttggtgcgttaggggttatgattgccattattgcatcattgctgattttcaattcgcaaccgaaacaagcgctaaaagatatcaatcaataatttcgaaagatctaacatccgctcgttatacaagcgggtgtttttttataggctcaagtagaaggcacactgaagctgaaagggatttttgccgacggagagcagaagcacagcaagttataatatactaggaagggaaataacggtatggcagaagggttctagcgcttctcgcctgtaagatcattactttgaggatgtgtcatcgtgaatcaaaagacgtacattgaaatgagcaggacatcgcagtacatcaacaaaatgagagagtattcagtgctaattgatggggctgagatgggaactatcaaagatggaggaaggctgcgaattgatttaccgcctggtgagcatgttattcaagtgaagattgcttggtgtacaagcccaactttgaggtttactttagcggaaggagaagtgttgaagtttagatgcggaagtccgcttcgaggttggaagttgcttttggcacttttttctgttttgggccgtcctgaaaattatctgtttatcgagcaggaagaagagaaaaaagctttgtggtgactgtatgttactacatggataaatatcgctgaattctgttttgtgaaagtttaattgacataagaaagaatggcagccttctcaatatcgtgctccttagagcaggctgtcaataaggaattctcggttgtcaattttcataaattcattgagaaactaaatactccttaatcaattgccacctgtcacgagcatgcatgatgaactccgatgcaatggctacaaccaggtttttctccggaacacagcaaatcacattcccgccatcgcctagtgctgagtatgagaaaacgccgtcctcatcactcagccaccatagataaccgtagttattggggtttatctctgttgattcgtcaatccatgatctccgaatgatctgttgattgttccaagtaccatggttcaaatatagataaccaaaccgagccatatcccgtggagtcagcgtaagtccccatcctccggttgagttgccgtccgggtacctctcacatgtttaccgaatagatcgtcaaagctgaatgatttcatttcataatgcggaatttctttcatgccgatcggtttaaataagtactcgttggcaaattcgcgggcgcttttgcctgtggtgcgggtgatgatggctgacagcaggtgtacgcctgcggtggagtatttaaatgtgccgatttttcctccttgacccagcataccgagcgtataggcgatccaatctggctgcatgcacatcttatcgagcggttcttgccagtcttcaaatggatagggagctgtcattgtgagaaagtggtgtcttgtttttgtttattaggagtattcgacacattctgggaaagaagcagtgttttccgaataaatccagctccaagaaaccaaatctaataaatggatctataaaaacgttaaaatcaaaagaactaatatatataggctaacgaaagagatatatcattttttgaaaaatagttttgattgcttatagttgacgagtattaagtgaaaacaatccaaaaaagtccctaacctaaattttaaatattaataattagatgcggttagagaaaaataagttaaatatttgaaaaaaatgttgaaaaaagacatataaaatgatattattacctatataagtaattaatttcttaaggaggaacgaaaatgaagaaaaaaattgctgcatttctactattaacaatagtagcgataagcacgataattcctgtcacagtatctgctggaagcggggaaaagtggaactatggttatgacaaaaagaaaatgcaggattacaatgattactaccattggctttatcgtcacaattcgtcaataacaaaaaaaggtataaattatccaggtcgtattgcccaacctaaatattggtccaaattaagactcgattataccggtccttataaagtttcctaccacaaacacgtttacaaatagaaaatttttcaaaagggatttatattataaaatataagtcccttttgcattaagataaataaggagaaaatatgattgaaataaaaaatatgaacaaatcattcaatgaaagaaaaatttttgaaaacttaaatttggttattgaacctggggagtttattggaattattggaaagagtggaaagggaaaaactacactgctaaatataattggcacgttagaaaaagcagatagtggttctgtaaaaatattagatagggatataaatagaaaaagaaataaaagatatttacttagacatcacttaggatttatatttcaaaactatgcattaattgataatgcatctgtgaatgagaatctagaaatcgcacttaaacataagaagatgaatagacaacaaaaaagaactgctatgtcttctgcattaaaagaagttggtttagataactatggtaaagaaaaagttcatactttaagtggtggggaacaacaacgcgttgccattgcaaggctgctgcttaaaaatcctactttgattttagctgatgaacctacgggatcattggatactgaaaacagagatattataatatctctttttcaaaaactacataaacaagagaagacaatcattatggtaactcacgataaagaactaataaaaattttttcaagaactctacaattataaagggggaatagattgtgaaaaaattattattccttctcgttattactacctttatagttgtaagtttcctatcgataaagcaatttgaatatttacagtttcaatcttttaatcataataatgttcatgattcatggaatgttgttatagatgaagggaattctaaaatcggtaaaaaagataattttaaaatgttggaacaaatagcatttgaatctaaagttaatttgcaacgcatatcatatgaaaatgataataataaagataaagtagtgtattatgttgttctctataatgcaccagaatattttaaagatctaaaactaagatatggggaatttttgcaaagtaatagtagttctaatgattttctatctactgttcaaacaaagaataagcatcagataggaacattagagatatttcatagttttgaacctattgaaattaggccaatgattgctgcggaaaaaacaaaagatattaaaggtacctatactgtaataggtgaaaaacatgctgaaaattttaagaaaatcgcattacagcatggtttttcaattaagttatccaaaaatgaagattcacaaagtgtgagtacaccatatccttatcaggaaatgatgtatataagctcattgattttatgcttattaataatgcttacaatattatatgatgtaagtaataactataaagaaattgctgttaggtatatgttgggatgtaatttatttcatataggaatatatctattcagaaaatatattcctatcattataagttccttgcttgttggaagtttaggtttaatattatatttatattggtataatcactatcaacaattcattgagttcgtatattttttatcgaaaaacattgctctgttatcaataatacttacaatcatttttttaataatatggtttagtactggaagtatcaatatcccacaaatgattaaaaataaaaaaccagtaagaatgtttttttatttaaatattattgtgcgctttgtactggcagtttttctattgttaggtttagagcaggggattagcaaatttcaggtgttaaaaagtacggtttcgaatcaagaaaaatggtctttgttaaaacaatattcttatttagggatgatagcttcaccagagcaaaaacaagaaactcttaattttcaaaaagataaagaagagcgaaaaaaaattcaacttttctataaaaaactagaatcccaaggggcgttttttatatatccttcggacttttactcgaatgattcacaaattacatctcaagacataaatccatggggagaagagggaagaaaagtagaaataaataagaattatttatcggttaatatgataaaagatatacatggaaaagatgtggggataccttcctctaataaagatgtaataaatgtgttagtaccaataaaatttaaaatgtataaagaagatattgaaagatcattagcagaagattataaaggtatatacgatataaaacgcgctgctcctgtaaaaataaatattatctatgtccagaataaccaatcttattttacgttttctacaaattcagctcaaaacagtaactataagattgtagatccgattgccgtaatagttaataataaatttgaccctttgatactagctaataatatttctatggggtatggtttttataccaaaattagtgaaggtaaagatcctttcaaaataataaaaagaacattagaggaatatgaattaaacaacatatggagccctgtatctattgcttattcaaatgtcgaattaaaaatagccaatgataaagaagcattacagttaacggctatatattgtggggtatttcttttgttagctgtagtattattaattttttcggcagtttattacttagaaatgaacaaaaagctattatcaatacaatggatatttggttatagcttttttgagaagcattgtttggtctatctctcggtgttggttttctggagtctgacttttatggttagcttttatgtatctggaaatattgcgttattgggtgaaatttccttatggttggcgattttagacatattattaacaagtatattattgattatgagagaatataatgttactaaacaagtcttaattaaagagtgattagtacaaataattgggggtaaacatttttgaaaagaaaaataaaatttcttacgatttgtttagcgtttgcattattatgtctaattatagctgcctattctatctcaacgaataaaccggatgatgaaaataatattaacaaaaatcaagttggaaaaacacaaaaacaagatagttcatattcagataatatggtatctgatcaagataataaatactatgtcatctatataaaacagaagaatggaacaggctcatcatttgtgcctgaaaagcttaatcctggtttcaaaaatgactctgatgattttaacgtaagtatttcctttgatgataaagggaacgtaattaataatgataaggtaattgaagtggaagacttctcactatcaaatactaataagaaaaaaattagaaaaatagttggtacaaataaatatgatgcagctttgaaagaagttgaagatcgagtgttagagactaagaaagaattagaagaaaattccaataattagtaaatatacaattagcagtattgaccgctgtaaataagaggcggtctttttgcttagaattaaatatttactaggtttaatagaaatttattttcatatcgtatccttttcgtattacgtgaaaggagcactatgaaagttgtactgactatagtttaccttctagacggagaataaaaaagagccggataaccggctcggtataagttaaaactgctttgttacgtcgtattcataatctatttttgcttttacgttgctcatcgtcgatctggctgtcgctaatgtattatatttaaaactccatacctttgccacactgagttgatctgacaaagagatatcataagaccctgaagtcgagctgtttacaagagcacggcgccattcgttgttttcgctcgtcatgatcaggtggcgtgtatttccctggcttggtgtttgagtggcggttgtctgaactctggttacaatggcatcacgcggtatcccagattggtttgttaaatcaaccttgatcacgctggagtcagaacctgaggggctaaggcttgtatttcctttattttcagcaatgccgctgaattggaatgttccgctgcctgatttgattcggtcttcaattgaaagtgtaaaatacatgtttccggtataggtgcctcgtgacactttcacataaaaggtatccgtcgtgttttgggcgtctgcatttgcataaataaaagaagaaaacgtattagggttaatgacttctgtcccttgagaaacaggtattctattcttatcataaatttcaattttcatccctgtatacgcgctctggtatgtactcctcacgtatactttttctcccttattagccgtaaaagtgaaataggcttcatcttgaccagcttccagtattgttgtatcgatatttttatatttccaataaccgatcggcattgcggtatcaaatgaattgtttcctgtgatagcagtgactccgacagctgatgccgaatacgtaaaggtgaataagacagacagcataacagcgaatggaataagccattttttcaccatgcaaacaacctccttttatttccatcatacataataacgatttaggtgtaaataaatgttttttgaggttaatatatacattatctttgccgataaaaaagaataagagagaatactcgggagggaattcaatgcgtctgaatcggcaatttatccgcactcagctgatggcacagaacatattgagcaagaatgcgcctgccaaacgggagaatgcgactgaaaatccagcggcagttctggaaaaggcatacagcaggcttaagtcacaatcttcaactgggggaatcaatcagttcaattattctaaaaccagcgtgtcgggaaacagcggggcgttcagcaaagtgtatcaatcagcgaatgatcgaacagtgacagacacaggggaagaaacagtgattcaatcccaaaacccctatgaatctgagagtgatatcagaatcaaaatactagatgaaaaatacagcaggatgaatgcgattaataaaacaaagtctgatccattaggctatattaaggataagtaccaaaattcaaagtctccttatttcagaagtgatctgtcagctgcagaaagacaggccgcttacgataatgaaacagaatggttattcaaagggaaggcgcaaaactataaccttcaggatgctgtgtttcggaatgtcacatttcatggggaagtggaagctgagaatgaaaaggtgtatcagcggggacaggttaaccagcagctgcaagtactgttgaatcgaaaccatattcatattccagaggggacagagctgacgtttacaatcacaccgattgactatcaggtgcgggtaagcgggacagacgatcaggatctgatcaagcaaattgagcaagtgctgcaatctggagacaacagcaaagaactatttttgcacatcatgaaaagccaaagcagtgattcagcacaattttccgaagaggcctatcaaaagtatcaggctgctcgtgagatgtatgaagttacaggctaccatttgaaggatttagaagtgattgatgggcggtacgtcacgcctgagggacgtgacttaatggatgtatataaggaagagcttgaaaaagatccagtgcagaaacaaacggcttcttatgctatatcttactatcgttcagagctcagtaaaatcgcggaagccgggtataatgccattccggatttcatcctatcaattgattacagcaatggatctctgagagatgtgggacaaagcaagagctatgggaccggagataccgggtggcttgaagcattaaagcgtcaaacgggtgtgaattattaggtaagctgttcatgtaggacagcttattttttatgagaatctaaggggtgaattaatcccaatattcaaataattttattatttttatataaaagattttaaaagaagtgaacgattcaaaactctgaacaaaggtgtttgcctgaaaaaaacaattgtattttccagagaaatttattatgatgaaataagtaatttaggagattatataacaattttaagtttgaattttctgattgttatcactgattcatgtgaaggcaagcaggtctgctgttttctcatttatgagtattttgttaggaggaggaagaggagtggcaaataaagaattaaagaggggcctgggcgcgcgccatattcagatgatcgccttgggcggtacaatcggtgttggcttgtttatgggttctgccagcacgatttcatggactggcccatctgtccttctggcttatgcaatatgcggaatttttatcttttttattatgcgtgcgatgggtgaaatgctgtatgtcgagccgagcacaggttcttttgcgacgttcggccatcaatatattcatccgatggcaggttatataacagcatggagcaactggttccagtggattatcgtcggcatgtcagaaattatcgctgtcggttcttatatgaagtattggttcccggatttgcctgcttggatacctggtatcgtggcaatggtgattcttggtgcggcgaatttaatttctgttaagtcgtttggcgaatttgagttttggtttgcgatgattaaaatcgtgacgattatcttgatgattattgcgggaatcggaattattttcttcggttttggcaatggcggagatgcgatcggtttgtcgaacctgtggtctcacgggggcttctttgcaggaggtttctcaggtttcttctttgcactgtctcttgtcattgcagcctatcaaggagttgagctgatcgggattacagcgggtgaagcgaaggacccgcaaaacacgctaagaaatgcgattcaaagtattatctggcgtattttgattttctacattggcgctatttttgtgatcgtgacggtgtatccttgggatgagctcaactcactcggaagtccgtttgtgtctacgttctcgaaaattggaattacggcagcggccggcattattaactttgtcgtgattactgcggcaatgtccggctgtaacagcggtattttcagcgcgggccgcatgctgtatacactgggtgtcaatggacaagcaccgaaattctttaagaagatttcacgcaatggtgtgccgctgtatggcacaattgcggtgctgatcggtttggctgtcggcgttgtactgaactatatcgcgccgccgaagatctttgtctatgtatacagcgcaagcgtgctcccagggatgattccttggtttatcattttgatcagccatatcggattcagaaaagcgaagggtgctgcattagataaacatccattcaaaatgccgtttgctccttttacaaactatttgacgattgctttcttgctgatggttctggttggcatgtggtttaacgatgatactcgtatctccctgattgtaggcgtgattttcttagcgcttgtggtcattagttattatgtgtttgggattggcaaacgcacgcaggccaatttgacaaaaagcgaacaagcagctgaataacgataaaaaagagacattcacggatgtctctttttttatttttcgcgtatggattttccctattttagcaagctatagggtaaagatagcagaaggaaaggtgttcataaaatggatgttacactcggttatttgcgcgaatcactttcgaatcatctagaaaatgaagtctgccagcgtatttgcaagaagatgctggcgaagcgttatgcaaatgaaggggaatttgtaaaagacttagatgataatgaaatgtcttttttgaaccatgtattagaaaaagaaattaagtatgcccagaatgaacaggatcaaaaacgggccaaggaattaaacgaggtgtatgaattactgctttgagaaaggcgggtaagaaatgggagcaattgaacgaagcggatatacatttcagccggagtttagcgttgtccgtcaaaacggagccatccatgtgtaccatcaaggagagtttgtggaagaaatcgaatttgaatttaacggggaatatcccgatcatgatttgattgaagagcttgtgaatcattattgttttgagcatgaaatttagagccctgccgtgcagggctcttttatttaggatgtgatcaggccatactttttcaggatatccacggtgatgtttttggcttttgtgccggaatcatcgacattggtgacaaagacataagagccatgctctgttttgatgaatccgacaaaccatcctaatcccatatctgtcaggcgagttccggttttcccgtagagcgtgtaatgatcgccttcctcttgaatcatcatgcgcttgacggttttcattaccggcttgtcaaatggaagctccttgttagccagtttctccaaaaaagtttcttgttccagcggagatattgtgagcgagctttgcagccaaaactggtcgattcccccgctgatatcctcgttgccgtaagatagtgtatgaagccatgttttcattctttcctcgccgatatctctcgctaatgcctgataataccagattgcggattcgcgcatggccgagccaagcgtatggtcgcggttccatgattcgaattcacgcttgaccccgtcccatcgttttacatcgtattcatctcttacagctttgacctgcaagccgattaaagcgttcacgactttaaaggtggattgcggagtttgtctttgatttgcccgttttctgttatagacaaatgtctgatccttttgtaaatcgtgaagaatgaaggttccatccgtatccttgaattcgtcatcgacattcattctgctgacattcaagtgtttttcatgagcagatgatgctgcgtggacggagaagccgccgatccctgcaatactcagcacaagcacaatatatatccattttttcattttgttctcccctttgttttgattaactaccttttctctctttcgtttgttcttcctttaaaaaataatcaaaaagcgcttaaatttggttttgtaaacaaatactgttactgggtttatagtcggaagataacgtgaaaatagagggtaaaaaggaaggcagggtaagcggatgaatgagcagattccacatgacaaaagtctcgataacagtctgacactgctgaaggaagggtatttatttattaaaaacagaacagagcgctacaattcagatctgtttcaggcccgtttgttgggaaaaaactttatttgcatgactggcgctgaggcggcgaaggtgttttatgatacggatcgattccagcggcagaacgctttgcctaagcgggtgcagaaatcgctgtttggtgttaatgcgattcagggaatggatggcagcgcgcatatccatcggaagatgctttttctgtcattgatgacaccgccgcatcaaaaacgtttggctgagttgatgacagaggagtggaaagcagcagtcacaagatggcagaaggcagatgaggttgtgttatttgaagaagcaaaagaaatcctgtgccgggtagcgtgctattgggcaggtgttccgttgaaggaaacggaagtcaaagagagagcggatgacttcattgacatggtcgacgcgttcggtgctgtgggaccgcggcattggaagggaagaagagcaaggccgcgtgcggaagagtggattgaagtcatgattgaagatgctcgtgccggcttgctgaaaacgactcccggaacagcgctgcatgaaatggcttttcacacacaagaagatggaagccagctggattcccgcatggcagccattgagctgattaatgtactgcggcctattgtcgccatttcttactttctggtgttttcagctttggcgcttcatgagcatccgaagtataaggaatggctgcggtctggaaacagccgggaaagagaaatgtttgtgcaggaggtccgcagatattatccgttcggcccgtttttaggggcgcttgtcaaaaaagattttgtatggaataactgtgagtttaaaaagggcacatcggtgctgcttgatttatatggaacgaaccacgaccctcgtctatgggatcatcccgatgaattccggccggaacgatttgcggagcgggaagaaaatccgtttgatatgattcctcaaggcggggggcacgccgagaaaggccaccgctgtccaggggaaggcattacaattgaagtcatgaaagcgagcctggatttcctcgtccatcagattgaatacgatgttccggaacaatcactgcattacagtctcgccagaatgccgtcattgcctgaaagcggcttcgtaatgagcggaatcagacgaaaaagttaaattaaaaagctctcttcctttatcgaagagagctttttgattacttctttttttcatcgtagtattggacgggatacatggagccttctgataccattttgttgtcctcgatatcttgcgggtccgggtggccggctttatcaactgggaacgtttccatgtctggctgttttgttattttcatcttcatgctgtgaatgaattctcttgccttttggcgatttgacgggtcttttaatagataagaagtgatgccgacagttgaaacagcgagacctgaaagtaacagcttttgtttcatggtgatactcctttctattttaagaatagtgtttcctgtatcattcccgttttggaaatagctaaacctattgtgtttttatcgtttggattaacagtaaattccatttaagaagaaactagtgacttcattcctgtattggaaggtaatatacattgacttattatcgtttcagtcaaaattcgataaatattgacaaagtaaagtaatcagaataataatataattagtaagagaatgtcatcatacatgaaaggtgtttacgatatgaatcaattgcatcgaagaatgggaacgttttccctcatgatggtcgggctcgggtcgatgatcggttcaggctggctgttcggggcttggcgtgcggctcaaatagcaggaccagctgctattatttcatgggttattggaatggtcgtcattttatttattgctctttcttatagtgaactaggttctatgttccctgaagcggggggaatggtaaaatatacgcaatattcacacggttcgtttatcggttttattgcgggttgggccaactggattgcgattgtgtccgtcattccggttgaagcggtggcctccgttcaatatatgagttcttggccatgggaatgggcgaaatggacaagcggtttggtgaagaatggaacgctgactggggaaggactagcgtttgcctctgtattgcttctcatttattttctgctgaactattggacagtcaatctattttcgaaagcgaattcattaattacgatttttaaaattattattccgggtcttacgattggagctttgctgtttgtcggattccacggagaaaactttactggcggtcaaagcattgcgccgaatggctgggcaagtgtgctgacggcggttgccacttccggtatcgtttttgcgtttaacggtttccaaagcccgattaatatggcgggtgaagcaaaaaatccggggaaatcaattccgattgcggttgtcggctctcttttcgttgcgacagtgatttatgtcctgctgcagatcgccttcatcggagcggtgaatccttctgatattgctcacggctggagccatttgaattttaattctccttttgctgatctggcgattgcgctgaatattaactggctagttattgtgttatatgcggatgcatttgtatcaccgtctggaacagggattacgtatacggcgacaacgtcccgaatgatttacggaatggaaaaaaacaaatacatgccgagtatattcgggaagcttcatccgatttacggcgttccgcgacaagcaatgttctttaacttgattgtgtcgttcatctttttgttcctgttcagagggtggggcgtattagcggaaattatttccgttgctacgttaatttcttatatcaccggcccgatcacagttatgacattgagacggacggggaaagacctgtacaggcctcttcgtttaaaaggcttaaacgtgattgcgccgcttggatttatctttgcgtcactggtgctgtattgggcgcgctggccgttaacagggcaggttctgtttattatcctgatcggtcttccgatttatttctattatcaggcgaaggcgaaatggaaagggtttggccggaactttaaagccggcgtctggatggtgttttatctgctggccatgatggtcatttcttatttgggcagtgataaattcggcggcctgaatgtcattcattatggctgggatatggttctgattgcgatggtatcacttgtattctatgtgtgggcgctgaagagcggctaccagacagaatacttaaaggatgcgaaagagataaattctcagctgcttaatggacagtcagaagctgctgccggaaaagaataaaataaataagaaaaccttgcgatagttgtcgcaaggttttttgcttttaataacccttttttactttgtggaaaagatcaggatagttggtgaacactcctgttacgccccaatcaagcaggcgatgcatatcagcttcattattgactgtgtaaggatgaagcaggaggccgtggctgcggatcatacggacgttttcttgatttaaagctttataatccgggcccgcaccgacagcgtatgttttgatttcttccagggcagcatctgtcattgacgccatttgtttggcttccagcaattgaacggtcggcaggtttggctgtaattgatggatttttaccaggctttctttgctgaacgattgaatgatcacctggcctggcttagaatgcttccccagtaatttatgtttctgcaaagaagcgatcagtttttcttccatacctgggtaggtgtcaggcgattttgtttcaatatagtagttcgcgtgctttccgaaacggtctaatacctcttctaatgtaggaactttaaggccgacgtactgcggctttgctttttccggataggcttcattaaaccaagaaccggcgtcaagcttcttaatgtctgcgagcgtatggtctttcacccagcccgttccggttgtggtgcggtccagtttttcgtcatgcatgacaatcaatttcccgtcttttgtcatttgcagatccaattcaatataatcagccttcattttctgagcggtttcgtaagacagaatcgtgtgctcaggcacatatccagaagcccctctgtgcgcgacggtcaggatacggtcaggtgacagcaggtttccttttgacgctgccgacactggcgttaccataaatgagagtaagcccagcgacagaacaaacaaggccagtattctattttttctcatgatttctcctccttatagataagcactacctgtctttcatattaaaaaacggatgtaaacggcgtgttggaaaactattaatcttttatgtgtctttcttaaacatgctctgcccgttttcctgtattccacgtcaaagccaagaagacgatggcaagaatacaggatgagatcagcatgataaagccgccgttccagttaaaacggtccacgacaaagcccataatggcgtttgcgaaggcggatccgccgatgtatccgaaaaatccggtcaaaccggctgcagttccggctgcttttttcggtgctagatcgatcgcttgcaggccgatcagcataacaggtccgtagattaagaagccaatgctgatcagggcgatattgtctacgagcggattgccggccggattcagccagtacaccaatacggcaatgaaaacacccgccataaacaaaacgcctgccggtgcccggcggcttttgaagaatcggtcactgatccagccgcacaagatcgttcccggtatgcctgcgtattcgtaaagaaaatacgaccagcgtgagtcttcaggagaaaagcctttggcttctgttaagtaagtaggcgcccagtcaaccacgccgtatcgcacgaaataaacaaatacattggcaaaagcgatgtaccaaagaaatttgttgttcagcacatattgaaaaagaatttcttttgttgttaattctttttcctgatttttaaaagcgtgttttggatagtcattccgatactcttcaattggcgggagtccgcaggattgaggcgtatcacgaaccaataaaacaattaaaaatgaaatgataatggcgatgatggcagggaagaaaaacacgcttttccaagtgacgaacatcgcgatcccaagagtcacaagcggagcaagaataccgccccctatgttatgggcgacattccagatcgacatttttgtgccgcgttcacttatggagaaccaatgggccatcgtcctgccgcatggcggccagcccattccttgaaaccatccgttgataaacataaaaataaacatgatggtgacgctcgaagtcacccaaggcattgaaacgaatagaatattaacgattgctgataaaaataggcctgtcgccagaaaatatctcggattacagcggtcagacaccattcccatgatgaatttgctgaagccgtacgcaatggacacagcggccagcaccaaacccagttctgttttcgaaaatccctgttcctgcagataaggaatggcaaaggcaaagtttttccgcagcaggtagtagcctgcgtagccaatgaaaataccaatgaatacttgcagtctgagccgtttgtatgccgcatccatctttgaatcatccagtctctcaatatgaggagccggtttaaatatattaagcattaaaattatccccctttgctgtttgtgctggatgtgtggcgtgcctcctttcccgaaaaacaaaaagagccagaaaacaccccttgtcaaaaggggttggattcctggctctcctcatctccatccaagctattaacttatcatgatagcgctttcttaaattatcatagtccggagcgaatgtaaacgggtaattttcaaattgggccttagggaagtaaatattatccttttactaaatgcagttatgtttttttactagtaacataaaaatctggagggaggctgtttaaaggtggatgaattagatatcgcattctttattttaccgttaggaattatgctgctatcgattgtcgggacctgtatttgtaaaaatccgtatctgatgccaatgcttagtttggtgatttctcttgtgctcacctttaccatttttattgaatcatttttgggatgggctgttgtctatagcttggtttctctggctttatcctatatcacattgattgtggtaaggaaaaggaaggaatcaggaaattaaaaagacctcactttctaacatatcgttgactaaggcaactatatgtgattataattggcttagtcaacaatattagaaagtggggattgatttgaaaacaagagaatcatctgtcggattaaaattcagaaagttcaatcgattttatacaaacgtccttggtttccttaatgagcacatttacgacagcccgttttccttaacagaaacacggattttatttgagatttataatacgcctaattgtacggcaaaagctcttcaggataagctggggcttgaccggggatatgtcagcaggattgtgaagcagtttgaaaaagaagatttgatctataaacagaggagcaaagatgacgcccgccaccattatatttttgtcacagaaacaggaaaaacgatttataaaaagctggaggagaaagccaacgaacaagtagaactgatgctgaatgaaatcaaccaaaaggagcagcacaagcttgccgaggcgatggcagagattgaagcgatcctttcacagtcgctttctgccagatcatcagagatatcgattagagattattttctctcggaggatcttcaactccttattgagaaacaaagacaattttacgcggaggctcacggttgggatgacacgtttttagcttatcttcaggagacatttgacgctgaaatcgaaaaaatatggattgcggaaagcggcgggaaatttgccggctctgtcgggttggtcaagcatgatgaaaagacagttcagctcagatggtttctggttgattcggattttcggggcagggggctcggcacgcaattgctggagcatctggttgcatactgccaagacatgaagtttgaccgcattttcctttggacggtgagtaccatggctgaggctcgtccgctctatgaaaaatttggattcaagataagtgaagtgaaacaagaagcgccattatggggacagcagctgacagaagaacggtgggatttggagctgtcatgaaaagactgcattatgcttgggtcatcgtctccgtcaccttcttgatcttattggcggttcagggggtgcggctgtcatttggtgcgtttgtggagccgtgggaacggcagttttcaatggatagaagcaccatctcgctgatttcgacgatgagttttattgtttatggcatatcacagcctgtgattgggcggcttgtggacaaatggggtgctcgggctgttttggcatggagtgcgttactgacaggagtcagcattttcttaacataccttgtgacttcgccttgggagctgtttttgctttacgggctgggtgtctcgcttggagttggcggagcatcgaatgtggcggcaagtgtattggtcgtcaattggttcagcaaaaatcggggactagcctttgggatcatggaagcaggctttggcgcggggcaaatgcttctcgttcccggctcactcatgttgatccattggtttagctggaagctgacggttgtggtgttgggactgctgttaatcgtgattgtctttccggctgcgctgctgatgctgcggaacaatccttcagaaaagaatacagagccgataggcggactggctgcatcagaaaaagaaacagcacccaaaacaacagctctttcagtggccgggatgtttcgtatgaggcaattctggttcttgatttttccgtttttgatctgtggttttacgaccgtggggctgatggatacccatttgattccgttttctcatgatcatggcttttcaacgacagtcacgagtgctgctgtcagtctgctggcaggctttaatattgctggcatcttgctgtccggaattgtagcggatcggtggagcagccggaaaatcctgtgctttttatatgcggtgcgggcgctgtcgatcgtgattcttatttacagccacgagccctacttgcttttaacctttgcgattctgtttggattagtggattttgcaacggtagcaccgactcaaatgctcgccacccagtactttcaaaactactcgatcggcctcatgattggctggctgtcactcgcccatcagatcggatcggcactaggtgcgtatgtgcccggcgtcatctatacggtaacgggtgagtatacactggctttttatttgtcgattggaatgctcgtgcttgcgagcgtaatgaatgtgatgctgagggagcctgcggcggtcacgcgtgacagtgcgtctgtggtagacaagtgatgaggacaaagggaaagcatctctgatttcgagattattcagagatgctttttttgtatttttgttctaatacgaagtcgatcataccgactatgcgggcgttttcggatttttgtttgaagcgttctgaaatttgaacttttcttgaaaatgggtaaacaccaaatacccatattaggccaattaacacaaaaaacatttgtacacccatttctattaaatcattataatgagaactgaaaaaataaatatataacgttattaatgttactgtaaatacgattttgacagtgtgtttgaatgtgagctgtggttcaattaaacacaatttcatttggttaagtgtgaaagagtcttgtttcattaggtacgaaagtaaatcattatcgttttgactgatagggtacaagtcagtttctattttttttgtgatctcctgatatttatgtatattacttttcatacagtatccccccttttttaagaagaactccatgaatccctacaggactcatggagaaacaatattatttaaaaagtgctaaaaatgtacggaagagtactgcagcagctcccatttcaggacctaccgttaatactaatgcaccaataccagcaacaattaagatacctgtacctaccacaagcatgttgttgacaatagtatcccaatctggtgagtatacttcctcagtatctggtaaagtaaagtgcttctgttttattttaaacgtaatcgtagtcgttagtccagttgtgatattgtcaccgactggaatatcaggtgtatagattttaatttgaatatttaaagattcagctgttggatttacataaacctccaaataaccgttgcgtactgataagctgagactatttaaaaggttttgataagagtcgatttgtgacgcagtaagagacgtttgagtgtcgcccaataaacccgtgatataggcacctggtttaccatttgtaatggtaattgtgtttggtgaaccttcacttggtatggttgccaaaagtgaagttgatagaataatatccaattcaggtgatgtgaaaatggtttctgtcgtatcaaattcaaacatcgcgtttgccaaacttgttagattttctaaagccggaatggtagataaaatgtctgtcagtgtacgcagccttgcatcatataccggatcagacggcggatttacattgcttgcacctgagtctcttcctgaaaatccgtctttatcaattccgatgcttccagaaccgcttccgatggttccttcataaaattgatcaaaggcccagttgtttggcataggatagccgagattgccgctaaatcctgttgacatatttgccacaaaactatactttgtcagttctgcttctgatgtacggatacaaatgtttcttggtccgtaaacccctatttcatacttaggtgcggttgaaaatgtctgcatttttgtaaatgctgacttaatctcttggaaataaggaatgattttatcggtcacttcataatcgtatgcatcaaaatcgacagcgaaataaatggtcgtgcctgacggaaaacctaatcttctagcaacagaagcggcactatatgcatctcttgtgccttggtctttgacaaaataagaagattcatagccgccgtcttgataaattgggaaaaccttcaatccggcatcaagaataactgcaagctctttagatgtcagggcttttgatgtgaggccgctgcttgtccgcacatttccggtcaaatatctgccaaccgttttataaccgttattccgcagtgtttgagctttttctgcggttataattgtagcagtgtcacaagcagaagcggcgcgagttgtgtctcctgagcttgataataaagctttaatggttggcatatctgcataacctgtttgcggcaggcacatgaactcttgaaatgctttaacagctgaaacaacacccacaccatatttgccgtcaaactcaccaggatcgaacgattttccgttacaatagagggcgtactgaacaattaagacaaatcctgttcttgaatcgccgggagttaaagtaggacacaaacttgtggtgccgtttccgaaaaatccattggcaacacttgtgctcatgccttcttctttttgcagggcataaataagagctttatttgtatcgcggccatacagtccgtcacaaggcattaacccgatatagtcattgtagtcccgatttaagttttgttgaatctggcgaattcttgaatcacccccagacaccagcttaaaagcgctcatgtctaataaggctttcataattaacgtggtgacaatcccatcctgtgttgtcagtccggcagctttttgaaattcttttaccgcattttctgttttttcgtaaaagacgcctgtaaaaccgccgggattaaagcctttacaccataaagccccttgtaaaataaaattcatgttgcttggttttgaatctggagcttggcgtttaagaggcttaaataagcgctgtgttgtcggcccgaagttatcggctggctctgagatacccaattcaatttgaagcgcccgagtcagaccgtagatcgtatcccacccagttttcccgctttcttcaactgggttatacccatgtttgccgctgtacgtatcgttcagccattgctgtgtgattaagaccatttcatcaaccatttcgattcctcctttgttagattgcgttcatttataggtggcaaacgtaggacaaaataaaaaaatggatgccgttaagcatccattttacatccgttctccaacagcttcgctttcggtttcagctctgaaatgtagaggcctaaaagtgtaagcgcgcctcctagaagagcgatccatgtcatgttttcgtgcagaatcaggacagaagcggcgatcgtgataaccgggaccatgtaaatatacgcactggatttgacggctccgagcacgccaactgaataattccaagtggcgaagcacagggcagaagcgccaattcctaagaaaagcatgttgagtatatttgaagcagatgaaaatcggcttaggtcaaaatggaagtcgaacaaaaataaagcgggaaccataaataataggccatacaaaaatactctctgtgtcaactcgatgatgtggtattcgtaagcgcttaattttttcatgaatatcgagtatccgccaaacacgagagcagccccggctgccatgatgtctccgagtggatttagacgcagtactacattgccgttaaacgtaatcaataaaagcccgatcagtgccgagacaaatccaatcaaaaaagtcagacgcagtttttcgccttcgagcagaaaatgggccaaaaccgcagtgatcatcggtataatggacacgatcatgccgacattggaggcgtatgtataggtgagagctatattttctaatagaaagtataaggttacgccaaataaaccagccccggcaaacaacagctcctgccgccaatttctgaacggaatcatgttggggcggacgaggataagagcgataaagcccatcaaaaaccgataaaataatatttccattggagagaagtcagccagcagaacttttgtcgaaataaaggtcgtcccccaaatcagaatggtcacaatggctgcgatatgccccgaagtttctctttgtatgttcatctgtgaagctccttttcaaaaatcttcatgtattgcttcggcgtcagccccacctgccgtttaaaaaacttcgtcatatggctctgatcgctgaatcctgtctgaaatgccgcatcaatcggccttaccccttgttcaagaagttttttggcttgattaatccggattgtttccatgtagctattaggagtaatgcctttttgttttgtaaatgaacgcaataaatgatacttgctccagcctgttaattcactcaaatcattgagtgtaacattttcggcataatgctcttctaaaaattcacaaaccattttgacttcgtctgatggttctggaacgctgctaaggaacgtgacatctgaataatggcggatcagctcttctaatagatgaagaaacagctcctccttacgcaaagcttgtttttcctcggatatcaaaatatgcaattcctgcaggctggctgtcagctcatggcggaataacacatgctgggagaaataagggagatgcccggcgccagtaatctctttcaccgccttctccatgatatccggcatgacattgatacaccgataatcaagcgtccggccgtcaatctgttcacagctatgcgtgtcacgggggttaaagaggagaagatcacctggattgatgatatattcttgatcctggcaggccagataccgttgccctttttcaataaatccaatcacataataatcgtgaaagtggttcgggaacttttgcataattcccttgaagcggtaggcttctatatgaaggtgtgggtcaagctgcagtgtgcgggtttcgttttgcatgggatgcctcctgtcggtgtggtggtcttggattaagtgtagcatgattttgggggatttcttgtatgatgttgctgtttaggaatagagaaagcagaccgttatttgtctgctttcgtttaagaatttaaaagattttaaccctcaataataattttatcttttttaataaaaatttatttttcaaatatttcagttataatggtttggaacagataggaggggcaaagatgtatcaatcaaagaaggttttattgttaggttcaggtgaattaggtaaagaggtagtgattgaagcccagcgtcttggggtacagacggtggcagttgacagttacgagcatgctccggcgatgcaggtcgcgcataacagttatgtcgttgatatgctggacccagagcagatcagaaccatcattgagaaagaaaatccggatttgattgtgcctgaggttgaggcgattgcgacggatgaattgctgaagcttgaagaggaaggatttcacgttatcccgaatgcccgtgcggccaagctgacgatggatcgggaaggcatcagacgacttgcggcggaaacgcttggacttgcgacagctggctatgaatttgcgaatacatatgatgaatttatacaagcggcagctcagatcggttttccttgtgtcgttaaaccattgatgagttcttctggaaaaggccaaagtgtgtgccgctctgaagcggatttagagagctgctgggagacggcgatggaaggcggacgggtgaaaaacggccgcgtgatcgttgaggagtttatccctttcgaatcagaaatcacactcttaaccgtacgtgcggttaacggtacggcattttgtgagccgatcggtcatgtgcaaaaggacggggattatatcgaatcgtggcagccgcatgatatgacagagcagcaaatagaagaagcgaagcatattgcgaaaacgatcacggatgagcttggcggatacggcctgtttggtgttgagctgttccttgcgaaagatagggtatatttcagtgaggtatctcctcgtccgcatgatacgggtcttgtcacgctggtgacgcaaaatttgtcagaatttgcgctgcatgtccgggcgattctcggctttccgattacagaaatcacacagctttctcctggcgccagcaggcccctcaaagcgccggaagaattagcggattacactgttgaaggattggaaaacgcactggcagtcccaaagactcaagtgcgcgtctttggaaagccgataacaaaagccggacgtcgtatggcagttgcgctttctgctgctgattcagttgaaacggcaagagagaatgcaaagaaagcgttggaccagctaattttaaaatagagtttgaacaggtcttgtcatgggacaaggcctgtttttttctttctccgtaaaagttttatcataagaatcagaaacctgattataatgtaaaagtcttccatcgatacgggtggttgacactaaaggagggagatgacaaaatgaaattagttccaagattcagaaaacaatggttcgcttacttaacggttttgtgtttggctttggcagcagcggtatcttttggcgtaccggcaaaagcggcagagaacccgcaaacttctgtatcgaataccggtaaagaagctgatgctacgaaaaaccaaacgtcaaaagcagatcaggtttccgccccttatgagggaaccggaaaaacaagtaaatcgttatacggcggccaaacggaactggaaaaaaacattcaaaccttacagccttcgagcattatcggaactgatgaacgcaccagaatctccagcacgacatcttttccatatagagcaaccgttcaactgtcaatcaagtatcccaacacttcaagcacttatggatgtaccggatttttagtcaatccaaatacagtcgtcacggctggacattgtgtgtacagccaggatcatggatgggcttcgacgataaccgccgcgccgggccgcaatggttcgtcatatccgtacggtacttattcaggcacgatgttttactccgtcaaaggatggacggaaagcaaagacaccaactatgattacggagctattaaattaaacggttctcctggaaacacggttggctggtacggctaccggactacaaacagcagcagtcccgtgggcctttcctcgtcagtgacaggattcccgtgtgacaaaacctttggcacgatgtggtctgatacaaagccgattcgctccgctgaaacgtataagctgacctatacaaccgatacgtacggctgccaaagcggctcgcctgtttatcgaaactacagtgatacagggcagacagctattgccattcacacgaacggaggatcgtcatataacttgggaacaagggtgacgaacgatgtattcaacaatattcaatattgggcaaatcaataaatacagcaaactagccatattcatgtctattttgtttttatgcgggtgcagttcgcagacgcattcttctcaaaaagaaacgactattcctgtcactcttcatgtggaggatgctaaggggctgccggtcgaaggggttcaagtgacgattgtcaaagcgccctcttcagatgaggagccgagtacagagattggcgagatactcggtaaaacagacaaaaacggagatatcaaatgggataccggcagaaaaggcgattactcagtcgcgttgacgaagggtgaaacatcagtaacccatcacatctcgttaacagaggataaaaaagatcatgccattccattagtcttcaaagaatagcagtttccttgattttaagggaactgccttttttatttattgcaggaaaccaaactatatactggaaatttattatgtgagataataagaaataggtattttttcttacgagacaaaaggggcgttatcctttatatcaatcaaacccggaggaaaaagaagaagatgatacaagattcaatgcagtttgccgcggttgaaagtggtctgcgcttttaccaggcatatgatcaaagcctttctttgtggccgattgagtcggaagcattctatgtttctactcgttttggaaaaacacatatcattgcaagtgggccaaaggacgcaccttcgctcattttgcttcacggaggccttttcagctctgcgatgtggtatccgaatatcgcagcgtggagcagtcaatttcgtacatatgcggtcgatataataggagacaaaaataaaagtataccatcagcagccatggaaacgagagctgattttgcagaatggatgaaagatgtctttgattctcttggacttgagacggcacatctggccggcctttcgcttggcgggtcccatatcgtgaatttcttactccgcgcgcctgaaagagtagagcgggcggttgttatcagtcccgctgaagcgtttatttcatttcatccggatgtctataaatacgctgcagagcttacaggggcaagaggagctgaatcatatatcaagtggatcacaggcgacagttatgatctgcatcctttactgcaaagacaaattgtggcgggcgtggaatggcaggatgagcaaaggagcctgaagccgacagaaaacggctttccgtacgtgttcacagaccaggaattgaaatcaatacaagtcccggtacttctgatgttcggtgagcacgaggctatgtaccatcagcaaatggcctttgagcgggcttcggtattggtgccgggaattcaggctgaaatcgtaaagaacgccggacatctgttatctctggagcagccagagtacgtcaatcaacgcgtcttgtcctttttatgcgggggataaaatagtaaggaacatgaaaagattggcattcatttttcaaaaggtaacaaatgttgtataataatagaatttgaatgctgctttttttgggagcattctatgttatcatgcttattggagaaaaatttttcctgtaacgctattcgatcactatcgtcaaataatatagatggttttacaattggaggtttggttacactgtgaattacatcccctgtatgattacgataggaaacttcatttgcggattgctggcgattcattccttgctatatcacaacattcattcagcagtgctttttatttttacaggcatgttccttgatttctttgacgggatggctgctcgtaagctgaatgccgtttctgatatggggagagaactggattcgtttgccgatctggttacgtttggggtggctccttctatgcttgcttacagtgtcgcgttgtataccctgccatttatcgggatcttatgcgcattgacgtacagcatttgcggaatgcttcgcctctctaaatttaacattgaacaaagcaagctcccgacgtttatcggtatgccgattccgtttgcgggcatgtgtctcgttattttaagcttcacctataacccgatccttctggcaatcggcacttgcggactctcatatttgatggtgagtaaaataaaattccctcattttaaaaaacatgcggcagaaaacctggagtctgggagatggaattagttcagcagctcatagcggattacggttatctcgctatttttttgatgctggtattaggaattgtaggattgccgattccagatgaagtgatgatgaccgttgttggctatttcacgcataccgatgtattgaattatgagctttcgatattgattagttttgtcggggctttgttaggtatgctgatcagctacatgattggcagaaaagccggacgcccgtttattgacaagtacggcaagtgggtcggcttaaaagaaaaaagaatgatgaaagtggaaaaatggatgaagaaatacggtccatattctcttattttaggttattttattcccggcgtcagacatgtgacgtgctacttttcggggatcggcaaaatggatctgaaaacgtatgttgcgtttgctgcaatcggcgcctttttatggtgctttgtttttattacaatcggaagggttatagggattattcatgtttaatacggctgtaaagattctgtatcgatcattgatagagctgacgaatcatcgtttgtcatcctatctgattaaaggattttgcgagtcgaaaatcagcaaaccggtcattccgcttttctcaaaacattttcggctgaattgggatgatgtggacggtacggctgctgattacggatcgctgtccgaattgttcattcgacaaataaatctggagcggcgccctgtgtcaaaagaggcgcatgcggtggtcagccctgttgacggtgtggttcagacggtaggaatcatcaacccgaatcaaacctttacggtgaagggaaaagattactcattcgctgagctgaccggctgtaaaagcgcagaccatcaatacaatggcggttacttcgtcgtgctgtatctaagcccgaggcattatcaccgtttccattctccgatcagctgcaggtatcaaaagctggccgagcttggaaatcgctcatacccggtaaatcaactaggcttaaaatacgggaaagatgtgctgtcgaaaaattaccggtttgtgtacgagctgaatagcggcagccgaaatctcctgatgattcctgtcggcgcgatgaatattaattctatcgtgcagacgaatacccgtactgaattggagatcggcgaagagctgggatacttttcatttggctcaacggtcattttgatttttgaaaaagacgcgttccagccgtccgcccatttagcagaaggccaagaagttcaagtcggagaactgataggttatgaagagtaaaaagaggagcttgcataaacgcagcgcctctttttttgaagaaaggtgagacttatggagaaacaaatcatcagctggattacagattatcagaacaccggagatgaagccgtcctgcggcaagtgcgagaagtgtgctggccgatcgttgaagcggttttgcatgagaaggcaatagatgatgaacaagcgaacaatttacgcgacaaaggaatcgagcggtttccattcatcatcagcaaataccaagcggatgtgcagcttccggttgagacatttttacgaaatacgtatcggttttactttcatcaggtgatgagagaatccagctaaagcttctttcaacagagaagcttttttttgttggcaggaaaaggaaactttttctatatctatctcgtaatgactagagaacctagcagaaaaggagagatagaattgaaacgaatgatagtgagaatgatcctgctgctgctgattgtctgtctggcgttttcttctttttcagtctcggcacgtgctgcttctgaagaaaaacattgggagcgctggattgaacgacatgcacagccactggatgcttccaatgcttcaaacaaagaccttcactttctgaagaaggtgctgaaaggaaaacgaatcgttcagttaggagaaacgacacatggcgctggcgaaatcaatgccacaaaggtcagaatgatcaaatacctccacgaagagctgggatacgatgtattggcctttgagtctggcttccctgatacaaatgcatcctaccttaatatggaccaattaacccctaaaagcacgatgaaaaactccatttacgctgtatggcacacagaagatgtcgttgaattgtttgattacatgaaagagcaaaaagagaaaggcgatccgctgatccttaccggttttgatattcaaagcatgaagaattcattcaatgatgctgcgactcattgggtaaaagcggtggaccctgagaaagcagagttgctctcccaatcagaaaatgatttttcaacattagtgacagacagcaatacgtttgatgaattttcgcaaaagaaggaaaagcttgtgaaaaactatcagaagctgatcaagttcactaaaacacatgcttcagagctaaaagaaaaccttccaaaagagccgaaagcttatgagatgtttatgcattctcttcagctgagaattgacgtaatggaaacgtatatgctggaagaaatgaaagaaaaactagaggagtatccggagaatattgaggatttttcattctttatgagagaccgcatgatggctgaacaatttcagtgggtagctgacaccctttatccgaaaaagaaaatcattgtctggggccacaattaccatctacgcaaacagaatacgaagatgataaaggactgggtacagctaaatggccctaacatgggtgattatttgccggagcggctgaaaaaacaaacatatacgattggcatttatgcttactcaggtgcgagtcttgatagctccgataataagactgttaagccggttacaagcccgccgccgtctgggagccttgaagctttgctgaaagcggcggaccgaccggctgtttttgttgattttctccatacaaaaaacaagaaaggcacttcgtggatgtataccccccgcacagcactctattggggattcacagaagagcagctgatccttaaggaacaatatgacggtgtcatttggctggagcatatcacaccatctgtcattatcaagtgagcggtgtcccctgtggtaaacaggggatttttacatatcgcaaaaataatcaaaacatataatccgtgatccattattctaaaacagaaaggagattggagcgtgcaatgtattatgaaaaagctgtccagaaaacaatcaattggattgaatcacatttacatgagcaaatatcaaacgaggatattgttaacgtttcaagcttttcaaaattccattttcatcggatttttcaaaaagaagtcggcatgtcggttgcttcttatattcggttaagacgtcttgcgaatgcggcggcagctttgctttatacagatcatcgtattatcgatattgctttgtattatcagtttgaatctcaagaagcatttacgaggacgttcaaaaagatgtatcacatgccgccaggagcataccgaacatttatgaaacgctttacttcaaaaaaggaggaatcttacatggagaaaaaaatgaaaggctgggtattgagcgggagccatccgttccaattcgaaatggggattgaccgggaaaatgtacatcagggaaaagcttcagggtatttaaagtcaacgatggttcaggatatcggtgaatttgcgacgatgatgcagcaattcaaagcagatcgctatctaggaaaaaggcttcgtctatcaagttttatcaaaacaaagggggtgcagcattttgcctcactttggatgcgggttgacagtgctgctgatgatgttctccaatttgataatatgagcaacagacctattaccggaacaaccaattggaatcattatgctatcgttttagatgtcccagaaaatagcgctgtgatatcttttggcgttcaattatctgggccgggtcaggtgtggatggatcatgttgtttttgaagaggtagatgagagcgttccttcaacaaaccttgaaatgccgggagaacttttagatgaaccggtaaatttatcttttgaagaggaactacaaaaatagttttcagacaactatttttattagtgagttattggaaaatactatttgttattaataaacccttgtgctgcttaggtttgtaagagcttggatatttttatcagtctgggcggatctgttcatctttgcggcattttcctgtatgatatagtaagagtgtgcatagcaactaactataattgaacagggtgtttaaaacatggaaaaacaatacagagtattactttactataaatatgttccgattgaagatccagaggcgtttagagagcagcatttggctttttgtaaggagcttggtttgttaggccgtatccttgtttcttctgaaggaattaacggtacggtatcaggtacggttgaacagactgaaaaatatatggaaacaatgaaagctgatcctcgttttgcggacatggtatttaaaattgatgaagcagaaggccatgccttcaaaaaaatcttcgtccgccataaaaaagagcttgtaacgcttcgtcttgaagatgatgtcgatccgaacgaaacaacaggccagcatttgaagcctgcagaattttatgagaagatgcaggatccaaacacaattgtcatcgacgcgcgtaacgattacgagtatgaccttggccatttcagaggtgcggtccgtcctgacatcgaagccttccgcgaattacctgaatggatcgaagaacacaaagatatgcttgaaggcaaaaagattttaacgtactgtacaggcggcgtacgctgtgaaaagttctcaggatggctggtgaagcaaggctttgaagatgtagcacagcttgaaggcggaatcgtgacatacggaaaagatccagaggtgcaaggcaagctttgggacggccagtgctacgtatttgatgaaagaatcagcgtgcctgtcaaccgtgttgagcatgtgattgtcggtaaggactactttacaggagaaccgtgtgagcgttatgtgaactgcgcaaatccatcttgcaataaaaaaatgatatgcacaccggaaaatgagtataaatatatgcgcagctgcagccacgaatgccgcacgaacccaagaaacctgtatgtgaaagagcataatatgacagaagaagaagtaaacgcaagactggcagcgattgaaacagaagatcacgctgctgctgaataaaaaaagaacacctcgtattgaggtgttctttttttctatatgctttcagtttggctgtttgcggaaacccattctttttggcggaaggccttttcccattttgataccacgatacaggcgatcgcatgtcccggtacgttcacgcccgttctcgccatgtccatgacgcggtcaacacccgcgataatggcaacgccttcagccggcagtcctacagcattggcagtcgccagaagaactacaagcgatcctgagggtacagctgcaatgcctttactggtcatcacaagcacaagcatcatgagcagctgctgggacaatgtcatgtctacttgaaaggcctgtgcgagaaagatacaagaaactgataaatataagctggagccgtcacagttcaatgacaagccggagggaacgacaaatgataccactcgtttgggacagccgtatttctccattctatccatcagctgagggagaatggtttcagtgctggtggtggaaaatgcaattaaaaacagatcccatatcattttcaatacttcgaaatacttaatctgaaagatgagaccgacaagcggaaagaggacaaagaggatcaggaacaggccaaggaatacggtgccaaccagcttaaacatagggaggaggagttcaatgccgtattggcctacagaagctgccatcagggctaacacgccgataggagcagtgaccatgacgatttgtgtgagcttgaacataatctgagcggtagattcaaagaacttcatcactggttcagaagctttgccgataccagcggcggcgacaccaaataaaatggcgaagaaaataacggcaagcaaatcatttctggccatgacatcaataatgtttgtagggataatatccaggatcatttgcttgaaatcaacaactttgtctgtgtagccggaaagttcatggatatctttttttgccaaatgggagaggtcaagcccgacacctggttttaagacattcgctaataaaagtccaagccctaataccaacgttgtaatcacttcgaaccaaatgatcgtcttgatgccgagactgcccatttttttcatgcttccgcttcctgctgctccaatgacaatggtagaaaatacaatcggcacaacaatcattttaatcaggcggataaatccatctccgacaggcctcagtgccatcccgaaatcaggaaaaaagtggccgatcaccgcaccgacagccaaagcgattaaaatttgaaacgcgattaattttttcaaatgaatccccctttagaacgatagaatgtaggcatattcatatcattcgtgattcaaatgcaaacaccttttttcaagttattttattttgacagcgctttcattatgttggcgaaaaagtcccccgcagcagggggacttttttacttcatttgaatgtgctttagatcttcttcagaggtatttgtgaaaataaccggtgttatggctgaagcggcatgctgcttgatgtaattgagatcaaaggtgagaagcagttcgccttgtttgacggcttgtccgcttgtgacatgtgcttcaaagccttccccattcagtttgacggtatcgatgccgacatgaatcaggatttcagtgccgccggcgctcataaagccgatggcgtgttttgtcggaaaaatcgagacgatctcgccgtccgcaggtgcaacgacttttccttctgatggtataatcgcaaatccctcgcccatcattttttctgaaaagacttgatcaggcacatcccctaaagagactgtttctcctttaatcggataaaaaaaggtctcaccggaatcgggcttctgcggtttgtcagttaccgtgtccagcgtggcggcggtggcagggacgcctccggccatgattgttttgatgtcgtcttttaaggcatcggacttggttccgaatattgcctggaagttgttgttgacctccagcacgcctactgcaccaagccgttttaattcatcctttctgacttgacttggctgatgaacggtcacacgaagccttgtgatacacgcatccaggttagcgatattttgctgtccgcccaaggcctgcaacacgtgaaaggcaagttggtcttttgcaactggagctttctcctcattctgaccgtcttcatctgtctcacggccgggcgttttcaaattccatttcagaatcgcaaatcggaacaaataataataaatgaaagcaaacacgatcccgacaggaatgacaacccagccgtttgtagacagtccgtagttcaagacgtagtcaattccgccgcctgagaacgtatagccgtggcggacatggaataaatcacaaacgacaaagatgacgccggcaagaatagagttaatcaaatagagcacgggcgcaacgaacaagaaagaaaactcaaccggctctgtaattccggtcagcatagatgtgagcgccgcagaaatcatcacgccggagatcatttttttcttttccggacgcgcggtatggataatggcaagagcaactgccggcagacagaaaatcatgtaagggaaatcccccatcataaagcgcccggctgtcgggtctcccgcgaaaaaccttgtcaggtctccggttacggtgttgcctgttgatgggtctgtgtattctcccatcataaaatagaaaggcgtataaaaaatatgatgcaggccaaaaggaatcagcaaacgatagatcgttgcataaaagaacaggccgactgttgaatcggcaattaaactgctggctgcgttaattccgttttggattagcggccaaacgaatgagaaaatgacgccgatcaccaatgaactgacggaagtaataatcgggacaaagcgttttccagagaaaaatccaaggaccggatgcagctcgattgatgaaaatcgcttatataaataggcggcgagaagcccgataatgattcctccgaaaacccccatatcaatcaggtgctcggctccttcatacggaggctgaaggccgagtaattttcccatattgtcgagggtgacggttaaaattaagtatccgatgacagctgcaagtccggctacaccttctccgccggctaatccgatcgcgacccccacggcgaaaatcagcgggagattatcgaatacaacgccgcccgcatcctttataatagggatgttcagtaaatccttgtctccgaaacggagcaaaagacctgctgccggcaggacggcaaccggagtcatcaacgcgcggccaagctgctgcagaatttgaaatgcctttttaaacatgacagtctccttttattgtgttatgagaatgatgcactctttaatttttgagctgctttataatcggcgataacggttacatgattgtgtttttgaagaatagaggctggtacatctgtcgtgacaggacattcagccatcttttgaatagcgtctgctttttcctcgccgcttgctaaaagcacaatatgtttgctgaattccatgatggttttaatgcccattgaaatcgcgagtctcggaaccagcaccggatcgccgccgaagaatctggcatttgcctgtatcgtgctttccgagagcttcacaacacgtgtccggtcttcaaaatcagatcccggttcattaaaaccgatatggccattggcgccgatgccgagaatttggacatcaatgcctcccgcctggcggatgagatcctcgtatactttgcattccgcctcaagctgcgggttgtctccttgcgggatatgaatatgatcaggctgcatattgatatgctgaaatagatgctcatgcataaagtggttataactttgcggatgagatggagagagaccagcgtattcatccaaattaaatgtagtaacctttgaaaaatcaatttcgcctgcctgatagtctgaaatcaactgcttatacaagccgaccggtgtgcttcctgttgccaggccgagaacggtatctttcttagcttgtatttgttctttaataatggcagcgcttaacttacagagttcttcgtagtgctcggcgattagaatcttcatgtgacaccccctcaaagagatagacaagcaccatatttgttatgaccaatttatgatacttgtcattacgaatttagcaccgcccttatcaaactgtcaatattaatttctgaaaatttgttataaaagaaggatacaaatctttcatattgggatggcaaatggtattatggtctcaatgaaaaagaacggattgcatacagaatggggagaatgaaatgacagctttatattctgtgatcaagtttaaaatcattgagttgattaaatcgggcaaatatcaggcgaatgatcagctgccgacggagagtgagttttgcgaacaatatgatgtcagcagaacaactgtgagactggcccttcagcagctggagcttgagggatatattaaaagaattcaaggaaaagggacatttgtatcggcggcaaaaatacaaacgccgattccgcataagattacgagctttgcagaacaaatgagaggccttcgttctgaatcaaaagtgcttgagcttgtggtgattcctgccgatcactccattgccgagcttttgaaaatgaaagagaatgaacctgtcaacaagcttgtcagagtcagatacgccgagggggaacctttgcagtatcatacctcatatattccctggaaggcggcaccggggctggcgcaggaggaatgcaccggctcgctgtttgagttgttaaggacaaaatacaatattgaaatcagcaggggcacggaatcgatcgaaccgattttaaccgatgaaacgatcagcggccacttattaaccaatgtcggagcgcctgcgtttttatcagaatcccttacctatgataaaaatgaagaagtggtggaatatgcgcaaattattacccggggagaccgaacgaaattcaccgtagaacagtcatatcattcataaagcaatgtgttttaagaagggaatggtggttctatgtttttatttacgaatggaaaagtgctgtggggagcagtgattgctgcattcatcctttcaattgtattttacccttttctgccgacgcagatgccgattcattatgatgttgcgaacagtccggatctgacggttaacaagctggcggggactgtgatgctgcctgttttgatggtggtgtttgcatgggcgcggaagatcaattggcaatttgtattcgcagtgtatattttgctgatttgccacattgtcgtcctttgtttagcgctctaaatcaaacagccagaataaaactggctgttttctttaatttcagcttcatctgacaatgaatgtggtgtataatagctgatgatcctaaagaatattctgaaatttatcggtgtggagcggcgtatcatgaaaggaagggctgtatgttttttgcagctttaaaaagactgaatatttaaacaattatatgaaaggtgtgctgatcagattgaataagcttattgaacgagaaaaaactgtatattataaggaaaagcccgacccgtcttccttggggtttggacaatattttacagattatatgtttgtgatggactacgaagagggaattggatggcatcatccaagaattgcaccgtacgcaccgcttacgctcgatccgtcttcatctgtttttcattacggccaggctgtttttgaaggattaaaagcatacagaacagaggatggcagggtgctcctgttccgtccggatcaaaatatcaaacggctgaacagatcgtgtgagcgcatgagcatgccccctttagacgaagagctggtgcttgaggcattgacacaattagttgagctggagaaagattgggttccaaagaaaaaaggaacgtcactgtatattcgtccttttgtcattgccacagaaccgagtctcggtgtgaaggcatccaggagctatacatttatgatcgtgctttcgcctgtcggctcctattatggcgacgatcagctgaagccggttagaatctatgtcgaagatgagtatgtgcgggcggtcaacggtggagtcgggtttgcaaaaacggctggaaactatgcagccagtcttcaggcacagcggaaagcgaatgagctgggctatgaccaggtgttgtggctggacgccattgaaaagaaatatgtggaagaagtagggagcatgaacatctttttcgtcataaacggggaagctgtcacacctgctttaagcggaagcattttaagcggggtgacacgtgcgtctgcgattgaactgattcgaagctggggcattccggttcgtgaagagagaatatcgattgatgaggtgtatgcggcctctgcacgcggagaattgacagaggtcttcggcacaggcacggcagcagtcgttacgcctgtcggtgaactcaacattcatggaaaaacggtgattgtaggcgacgggcaaatcggggacctctcgaaaaagctgtatgaaacgataacagatattcagcttggcaaggtgaagggcccgtttaactggacagtggaagtgtgaaaatcgaaaaagaacctgcctgaaggcaggttctttttattttgaataagtcatatcagcagccggctcgcttttgcggttttttacataatatattgcatagcaaatggccataaatggaacgccgcaatagagtgcgattctttgattcggatcaaaggcaatgccaacaacggaagccaggcataacaggaacgcagcaatcggcacgaacggatacaaaggggttctgtatttcaaatcagtaaccttgtttcccgcttcgatataacgttttctgaacatgaattgagaagcagcgattcccatccacacgacaacgacggcaaaaccggaaatcgacacgagcacaacgtatacagtgtctggcgcaaatacgctggacagcaacgacagaatgccgccgatcatgctgaacaccagcgcgttaaaaggggttccttttgacgtcagctttgcaaatgtcggatgaagcgttttttcttttgataaagaccacagcatccgggaagaagcgtagagtccggaattagccgctgacaggatcgctgtcaggataacaaagttcatgatatcggctgcgtatggtacaccaactctgtcaaaaacagcgacaaacgggcttttgatgacacctgcatcttgaatcggaatcagccctgacagcacaaaaattgttccgacaaagaagagtgagagacgccagaccgttgttttaatcgcttttggtatcgtcttgtcagggtcaacgctttcaccggctgcgattccgattagttccgttcccgaaaaggcaaaattgacggacagcatcgtcatcaaaatcgggacaaatccatttggaaaaagcccgccttccgcggtgaagttggacagcatcggagcggcttctccgcctttgatcggaatgatgccgaacatggcagagccgcctaaaagaataaataatacaatggctaatactttgatgctggaaaaccaaaattctgattcagcgaaaaacttgaccgaaaatgcgttaagcaagaaaatgaacagcgcaaagacggcactccacatccaaaccgatgtatgggggaaccagcgctgcattaacaggccggctgctgtgaattctgatcccaatgccacggtccatgttagccagtacagccaagcaaccgtaaatccggtgcccggccctatgtatttggctgcataggtgtgaaaggcgccggtcacaggcatggcgactgacagctcaccgaggcatagcatgaccagatagacgatgccggccccgactaagtaggcgagtatcgttccggccgggcctgcttgctgaatggtataacctgagcttaaaaacagcccggttccgatgacacctcccaaggaaagcataaagaggtgccggcttttcatacttctctgaaagtttgtctcattcttgttgtgggcagagttcatctttttccaactttctataagcgatttatttcctcctaataaaaaatctcatgtcaggaagtgacacgagactccggcgaaccggctttaagttagaatatacaaactattccgataagtcaagttgtttttaaagagcgggcccaagccgcaatttcttgaatatcttcgggttttgtccggcagcagccgccaatcagtctcgcccctttttcatgccaggtgcgggcgctcgccccgtaagattctgcgtatgctgcgccgttccacgtttttgtttccggatcatattgctcacctgaattcgggtagacaatgatcggttttgacgtgttcttttttaactcctctatcaaggaagggatatgctgaagcggcgtgcagttgatgccgagtgctgcaatttggcggtgttcatcaagccacgatgcgcagtcagctgcaggtgctccgtcactgatatgcaagccgtctttagcactgaagctgatccacgcatacgtttcaggaaattccttcaacagctgaacaatcgctttggcttcagtcagacacggaatcgtttcgcatgccaaaacatcagctccggcttcaatcagcgccttcatccggggacgatgaaattcaatcagttcatcttctggtattgcgtagttgccgcgatattcagacccgtctgcaagataagcgccataagggcctacagaagccgcaatgatcggctttggccgattcaaacggttctcttcaagcgaccaaaattcatcgcgtgcttcagctgcgatgctgacggacaactcgatgagccggcgtgcttccgcttcgctcagcccgcgtgcggcaaagccttcaaatgtagactgatagctggcggtgattgcacaatcggcgcctgctgcgaaataatcagtatgaacttgtttaatcagctccggctcttccatcaggatttttgccgaccacagactgtcgttcaaatcacagcccttgcgttcaagctcggtcgccatggcgccgtctagcacaataagcgggtatgtatctagtatgtgttggataggattcatagaatgtacctttctttcagatttttttgaaaaagatatgaaaatcgtaatggaggcttacgtgtttgtcaataaacgcaaaaagagaaaggtgttcagcccatatgtctgaacacccttttcttatgatatttgtttgttgtgcgtgtcagtctttgtgtctgaaaccggccagcactcaatgccattatggtttttgagcacatctttataaaagacaggatctttgcctgcttttttctggcgtgtatagtctttcagcgccgtaaaaacaacctttgatagtaagaaaatagcgattaaattcacgacgaccatcaaacccatgaacaaatcagcaagatcccagacgagctggactttggcaacacagccaaacacgatcattgccagcacgccgatacggtagacaaaaatcagttttttgcttttgttcaaaaagccgatattggtttcgccataataatagtttccaattagagcacagaatccgaataacaaaatcagaatggccagaaagcctgatgcccatgatccgacatgggagctgagggaggcttgtgtcaaggcgattccgctcagacccggagtatgataggcatccgaaaacaggatgataaaggcggtgcttgtacaaatgaccagtgtatctgtcagtacaccaaaagcttggatcagcccctgtttgacgggatggcttgttgtggcggtggcagcggcattcggtgcgcttcccattcccgcttcgtttgaaaagattccccgtctgacgccttgcatgagtgccgcgcccaaagccccgccggcggcctgatcaaaaccaaacgcatttttcacgattagcgcaagcacacttggcagctgcgtaatgttggtgaaaatgacgaaaaacgcaactccgatatacaggacagccaatacgacgacaatggattcagccagctttgcaatgcgcttgactccgccaaaaataatcgtgccgaatacagcaattaaaatgagtcccaatgtcaggcggtttgtgccaaacgcgttttcaaaggcaaggctgactgtattggattgaaccgagttgaagacgataccgaacgataaggtgattaacacagcgaacagcgcgcccatccaccttttgttcagccctttttccatgtaatacgccggcccgccgcggaagccgtttacatcttttactttataaatctgagccagtgtgctttccacaaagctggatgctgatccgataatggcgataatccacatccagaagattgcaccgggcccgccgagtgcaatggcgatggcaatgcccgtaatatttcccgttccgacacgggccgccatgctgatgcaaaaggcttgaaacggagaaatgctgttttttgaccgggaagcagcaccttctcttaataccctgaccatttctttcagcatgcgaacctgtaaaaacttaagcctgaacgtaaaatagattcccagagaaaggagcaaaacaattaatagctttgaccacaaaagatcatttgcaataccgacgatatgttccaggatttgctgcatacaatcacctcttttttcatatttaaaaaatgctgagctcccattcctgcgccatatgcttcagcagcataccgccagtgaggctgttgccgtattcatcaatggcaggcccgtaaatgccgatgccgcatccggattgaaaaggctgttctcttctggcgcttggaggcaccagcgccatgatgccgccggagacgccgcttttggccggcacgccgacaaacgccgcatatttgcctgaagcgttgtacatgccgcacgtcagcattaatgccttggctaattttgccacatcttttggaatcacctgctcgcgtcgaatcggatgatacccgtcatgagcaaggatcaggccgatcaacgcaatatcttctgtggtgctctccatagcgcattgcttcaagtacacctcaagtgtttcttctacgtcagcttctaaaaagtttgtttcttttaaatagtaggccagcgctctgttgcggtgggcggtttcccattcagaacggaatacttcctcatgaattctcggccgttttcctatcaaagtttccatcaccgagtaaagaaactcgagcttttcgtatgccgattctccgggaaggatcgaagcgatggtgagggcacccgcgttgatcatgggattgaagggctttcccggcttgttgatttcgagccgaatgattgaattaaaggcgtcgcctgtcggctcgacatctacgcggtccagcacatagggaatgccgcggctcatgcaggcggcaataaagctaatcacttttgaaatgctttgcagggtaaaagagacgttccagtcgccggcgtgtatcatcgttccatcaggctccaatacacagatgccgagctgtgaatcattgacttttcctaaagcggggatatagtttgcgctttgtccattggcggcaaaagggcgatagtattcaacccaatcatgaagctgtaacgccggatttatgtctttctggtgctcttttatcaattctttcatcgaattcctcctcactgatttttttcttaaaggactgaggtgtatcaaaacgaaggctaaaggggcgttaaacgctttcataatagcggaaggtataattactgtataatggagactacagaatcatacaaaatacgacaaaaacattttgaaaataagcagtaagatttataaaaacctcatgttctgggtcaaaagcaatttgcaggttttctcccgattccccaaaataaaaagcgaggatgtgatcaacataaaactggaacggtttattgaaaaagacggatatatactggccctcatgctaattacggtgccgctggccggtgaactgaaattttatcccctcaatgaagaattccgggtcagctttggggcaccggtttttttcttctttttatcgttgttgcggcatgtgcccgctgtgctgccgggttttctgactggagcggctgttttcatctttcgcgtctttctggaattatggggcggaggacacaatgggctgactccgattctgtatgatcaagcgtctggctttttcttttatatgacttacgcctgtctgttttccatattaaaggccaatcgtttccgtgaacggccgattatgctcggtttcattgggtttatgattgaagttgtgtcagattgtgtcgagctggctgtgcaatttctcatttttcatacggttgttacgcctgagaaaatcactgacattgcggtgattgcgatttctcacacatttattgtgatgagcttttatagtgtgctgaagctgtatgaaacacaatcgagagaaaaacagacaaggcagcagcacgagcacatgctgatgatcgtttccaatttatatgaagaaacggtgcacctaaaaaagacattgaaaacgacagagaaagtgacaaacgattcgtatcagctctatcgggaaatgaagggcaaggatgttcagctgagcggcagaatcctgagactggccggagagattcatgaagtgaaaaaggacaaccagcggatattcgcagggctttcaaaactgatttcgaatgagagtttgagagattatatgagggcttctgatttgctgcagctcgtgattcgaatgaatgaaaagtacgctgaagcactagggaagcagattgatttttactgctcgatcgagggagagcatgacgaatatcacgtatttatcgtgctttcgatcattaataatctaacagcaaatgcggtagaggctatggatgaagagggaatggtcagcctgaggctccgtaagccaaatgagagtatggtagaattccaggtggaagacaatggccccgggatttccgagaaaatcggagacattgtgtttgacccgggctttacttcaaaatatgacgaatttggcacgccttctacgggtatcggactttcctacgtaaaggaaatcgtgactgagctagaaggggatatcacgtttgataatcagcagcggggagtggtgtttgccatcaggctgcctgtccggcatttgattcagaaagggtgaaccgaaagctatgcgtttttttattgcagatgatgaccgtgcagtgcggtcaattttaaggcagatcattgaggacgaagatctcggggaagctgttggtgaagctgacgacggaagccaagtggaagggcatatgctgcaatttaagcagattgatattttattaatcgatctgttaatgcccggaagagacggcattgagacgattcgtcagatccagaatacgtactccggcaaaatcataatgatctctcaagtggaggcgaaggaaatggtcggggaagcgtactcgctcggcatcgaatattttatccataagccgattaaccgcattgaaattgtcacggttctccaaaaggtgaaggagcggattgagcttgaacactcgattggagccattcagcattctctaagccggcttgtcaatcggactgaacggaaagcgcgtccccagcagaagagtgacagcggtttaaaagaggcaggaacattcctgttgtccgagctgggcatgatgggagaaggcggcgcacatgatctcatggcggtcctgcagtatttagcagaacacgagcaatccgagccgcacgaaaaacaaagcccttcgctaaaacaaatattcacccaagtagcgctacggaagctgggcacaggggcctcacagacggaagtcaatcgcgaaatgaaagcctcggagcagcgtatccgcagagcgattattcattcgctgcaccattttgcttcactgggcacaactgatttttcgaatccaaaatttgaaacctatgcatccaaattctttgattttccggttgtcagccagaaaatgaaagaactccaatccaaggatgcaaaaccccttgcacctgctagaataaatatgaaaaaattcatccacgtgttttttttggaagcaaagcttttgcatgagacgatgaaacaaagaaggatataaaccaaacagccggctgaccaggctgtttttttgctgcgcagaatcccggccggacagtgattcaccgcttttttataaaatatcagaaaataaagatattgacttattgtttatttgtcttacaattaaacaaaaggatatatggggaaggagcggatgtgaaagaaaaattaataaaagcgcttacagatagaggctgtatacacaaataacaggaggttatgttgatgagccgtatcagaaaagcacccgctggaattttaggttttccggttgctccttttaacacacaaggaaaactggaggaagaagctctttttcaaaacattgagtttttgctgaatgagggcttggaagcgatatttatcgcttgcgggtctggtgaattccaatctctcagccagaaggaatatgagcaaatggtggaagtcgcagtctcggcagccggaggaaaggtgccggtctacacgggggtgggcggcaacctcagcacagcgcttgattgggcgcagctgtcggagaaaaaaggcgccgacggctacttgattctgcctccgtatttggtgcatggcgaacaggaggggctgtaccagtatgcgaaaacgattattgaaagcactgacttgaacgcaattctttatcagcgcgataacgccgttctctctgttgaacagatcaaacgtctgaccgaatgtgaacagcttgtcggtgtcaaagacggggtaggaaatatggatttgaatatcaacctcgtctatacgatcggcgaccgcttaggatggctcaacggaatgccgatggctgaagtgacgatgccggcttatctgccgatcgggttccactcttactcttcagcgatttcaaattatatcccgcatatttcgcgaatgttctatgatgcattgaaaaacggaaatgacgagcttgtgaaggaactctatcggcatgtgattctgccgatcaacgacattcgcaaacaacgaaaaggctacgccgtatccttgattaaagccggtatggaaatcatgggtttgaatgtaaggaatacagccagaccgcctgtcggcccggttgaaaaagatcattatcagcaattggaagcaattttgaagcaggcggctgaccgttttccgaaaaaagccgcgacggtttgaccagaaaaaacacgaaaggggcaatgggcatgtctgtgatcacggaacaaaacacgtatctcaactttattaacggagagtgggttaagtctcaatcaggcgatatggtcaaggtcgaaaaccctgccgatgtgaatgacattgtcggatatgtacagaattcaacggctgaagatgtggaacgtgccgtcgccgccgccaatgaagccaaaacggcttggagaaagctgacgggtgccgaacgcggccaatacttatacaaaacagcggatatcatggagcagcgcttggaggaaatcgccgcctgtgcaacgcgtgaaatgggtaaaacattgccggaagcgaagggagaaacagcccgtgggattgccattctgcgctattacgccggagagggcatgcgaaaaacgggtgacgtcattccgtctactgacaaagccgcgctcatgtttaccacccgtgttccgctcggtgtggtcggcgtgatttctccgtggaacttcccagtggcgattccgatttggaaaatggcgccggcattggtatacggcaataccgttgtcatcaaaccggcgacagaaacagctgtgacatgcgcgaagatcattgcctgctttgaggaagcggggctcccggcaggggtcatcaatttggtgacaggcccgggttctgttgtcggtcaggggcttgctgagcatgacggtgtaaacgccgttacgtttaccggttcaaatcaagtcggaaaaatcatcgggcaagccgctttagcgaggggagccaagtaccagcttgagatgggcggcaaaaaccctgtcatcgtagctgatgacgctgaccttgaagctgcggccgaagctgtcataacgggggccttccgttcaaccggccagaaatgcaccgcgacaagccgtgtcattgtacaaagcggaatttatgagcgctttaaagaaaaactgctccagcgcacaaaagatattacaatcggagacagcttaaaagaggatgtctggatgggaccgattgccagcaagaatcagcttgataactgcctgtcatacattgagaaaggcaaacaggagggggcttcccttttaataggaggagaaaagctggagaacggaaagtatcaaaacggctattatgttcagcctgccatctttgacaatgtgacatctgagatgacaattgcccaggaggaaattttcggtccggtgatcgccttgatcaaggtggactcgatggaagaggcgctgaacatcgccaatgatgtgaagttcggattaagtgcatccatcttcacggaaaacatcggccgaatgctttctttcattgatgaaatcgatgccgggctggttcggatcaatgcagaaagcgcaggtgttgagctgcaggcgccttttggcggcatgaagcagtcgagctcccactcccgagaacagggtgaggcagcgaaggactttttcacagcgatcaaaaccgtttttgtgaagccgtaatggtgctggaaagaggcatgcgtctctttcccagctttatcacagccagcatatgattctctactttgaaaaggagaagatactatgaaaaaagactttgcgaatgttacaccggcgggcaaaaaaacgtccgtgcgctggttcatcgtgtttatgctgtttcttgtgacctctattaactacgcggatcgagcgacgctttccatcaccggagattccgtccagcatgatttgggattggactcggtcgccatgggatatgtcttttctgcctttggctgggcctatgtcatcggacagcttccgggcggctggctgctggaccgttttggttcaaagactatcattgcgttaagcatctttttctggtcgttttttacgctgctgcaaggggcgattggctttttctccgccggcacagcgattatcctgctgtttgcactgcgttttctggttggtttatcagaagcgccttcatttcccggaaacggcagagttgttgcctcatggtttccaagctccgagcgcgggacagcttcagccttttttaattcagcacaatacttcgcaatcgtcattttttctcctttaatgggctggcttacccactctttcggctggcattccgttttcgttgtcatgggtattgcaggcattcttctggctgtcatctggctaaaaacggtgtatgaaccgaaaaaacatccgaaggttaatgaagctgagcttgcgtacatcgaacagggcggcgggctgatttccatggatgacagtaaaagcaaacaagaaacagaatcgaaatggccgtatatcaaacagctgttaacgaaccgcatgctgattggcgtgtacatcgcgcaatactgtattacgactctcacctatttctttctcacatggtttccggtatatttggttcaggcccgcggcatgtctattcttgaagctgggtttgtcgcttccctgccggcgctgtgcggatttgccggcggcgtccttgggggcattgtgtcagacatcttactcaaaaaaggccgttcactgacctttgcaagaaaagtgccaatcattgccggcatgctgctgtcttgcagtatgattgtctgtaactacacagattcagcatggctcgtcgttgtcattatgtcgctcgcgtttttcggaaaaggcttcggcgcattgggttgggctgtcgtgtcggacacgtctccgaaagaatgtgcaggattaagcggcggtttgttcaacactttcggcaatattgcctcgattacaacaccgattattatcggatacattgttaatgccactggatcttttaatggcgcgcttgtgtttgtcggcgctaacgcgattgcggcgatcctcagctatttgctgctggtcgggccgatcaaacgggtcgtgttaaagaaacaagaacaagaccccgatcaatcgttgcctgtctaatatttatgaaagcgctttataaagggaggaaaatgcatgagttcaccgatacaagagcaggttcaaaaagagaaaagatcgaatattccctcaattactgaaatgaaggtgattcctgttgcgggacatgacagcatgctgctgaatctaagcggagcacacagcccgttttttacccggaatatcgtaatcttaacggacagcagcggaaatcagggagtcggcgaggtgcctggcggagagcatattcggcgcacactggagctgtcagagccgcttgttgtcggaaaatctatcggtgcgtaccaagcgatattgcaaacggtcagaaagcagtttggcgatcaggacaggggagggcgaggaaaccagacgtttgatttgcgcaccactgtgcacgccgtcaccgcactggaagcggctttgttagatttgcttggaaagtttcttcaggaaccggtcgcggctttactgggcgaagggaagcagcgtgatgaagtaaaaatgctcggttacctcttttacatcggcgaccgaaagcggacgaccttgccgtatcaaagcgatgagcagtcagattgtgcgtggttccgtctgcgccatgaggaagcgctgacgccggaggccattgtgcgtcttgccgaatccgcacaagagcgctatggctttcaggatttcaagttgaaaggcggggtgctgcggggagaagaggaaatcgaagctgttaccgcattatcgaaacgttttccagaggcaaggatcactcttgatccgaacggggcatggtcattagaggaagctattgcattatgcaaaggaaagcaagatgtgctcgcgtatgcggaagatccgtgcggggatgagaatggctactccgctcgtgaagtaatggctgaattccgccgcgcgacagggcttccgactgcgacaaatatgattgcgactgactggcgggaaatgggtcacgcgattcagctccatgcggtcgatataccgctggctgatccgcatttttggacgatgcaagggtcggtgcgggttgcgcaaatgtgcaatgattggggtttgacatggggctcgcactccaacaaccactttgatatttcccttgcgatgtttacccatgtggcagcagcggctccggggcggatcacggcgattgatacccattggatctggcaggacgggcagcaattaacgaaacagccttttgagatttcttctggctgtgtcaaggtgccggataagcctggactaggcgtcgatattgatatggaacaagtggaaaaagcgcatgagatctaccggaaaatgaatttaggcgcacggaatgacgcgatcccaatgcagttcctgatccgcaactgggaatttgaccggaagcgcccgtgtcttgtgcgataagtttgtttgtaaatattgtcatatccgctattttgtcttacaattgaacaactgaagggagagttgttcgtgtacgaaggtttagaggatttgaaagtcgatacagtcaatcggaaaacattagccaagcaggtcatcgaacggattgtccatttattatcgagcggacagttgagggctggagacaaattgccgacagaaatggaactgatggacattttgcatgtcagcaggccggtgctacgggaagcactcagttcacttgaaacgctgggcgtcattacgagaaaaacacgagggggcacatatttcaacgataaaatcggcatgcagccattttccgtcatgcttgctttggccactgataatcttccggctatcattgaagcgcggatggcgctagaactcggactcgtgacaattgccgcggaaaaaatcaatgaggaagagcttcagcgtttgcagaagacgatcgacgatattgccaacagcactgacaatcattatggtgaagcggataaagagttccatcgaattattgcgttaagcgccaataaccccgtcgttgaagggatgattcagtccctgctgattacccatgcgaaaattgacagccaaattccgtacagggagagagatgtaacggtcgaatatcacaaaaaaatctacgacgcccttgccaaaagagatccgtacaaagcacattaccacatgtatgaacatctgaaatttgtccgtgacaaaattctaaaaggaatggatgaaaaataatggtgagcaaccgcagttgaaacgtaagagctgcggtttttttaaaaccaatttagaaaacgcttactaagttatgaggagtgattttcatatggcgatgaacctcaggaagaaccaagcgcccctttacatcaaagtgcatgaaatagataacaccgcgattattgtaaatgatggaggactgccaaagggcactgttttctcatgcggactcgtacttgaagaggatgttcctcaaggccataaggtggccctcaccgatctcaatcaaggggacgagatcgtgcgttacggagaggtgatcggatttgctgatgagacgatcaaacgcgggagctggatacgggaagacctcgtgagaatgcccgctcctccggcgttagacgatcttcctctcgcaaacagggtgccgcagccgcggccccttcttgaaggctacacgtttgaaggataccgaaatgcggatggcagtgcggggacaaaaaatatcctcggtatcacgacaagtgttcaatgtgttgttggcgttttggattatgcagtcaaacgaataaaagaagagctgctgccgaaatacccaaatgtcgatgacgttgtgccgctgcatcatcaatacggatgcggcgtggcgatcaatgcgcccgacgctgtcattccgatccgcacgattcaaaatcttgcgaagcatccgaacttcggcggagaagtaatggtcatcggattgggatgtgaaaagctcctcccggaaagaattgcctccgaaaatgatgatgacattctatcgcttcaggatcaccgaggttttgcggcgatgatccaatccattttggaaatggcggaggaacggttaatcaggctgaacagcagaacccgggtgtcatgccctgtttcggatctggttatcggcctgcaatgcggcggcagtgatgcgttttccggcgtgacggcgaaccctgccgtggggtatgcggctgatttattggttcgcgcaggtgcaacggttttgttttctgaagtgacagaggtgcgggatgccattcatttattaacgccgcgggctgtcagtgaagaggtcggacaatcactgatcaaagagatgaagtggtatgacagctatcttcggcggggagacgcagaccgaagcgcaaacccgtcaccaggcaataaaaaaggcggattatccaatgtggtggaaaaagcgttaggctcggtagcgaaatcaggcacaagccccatctccggcgtgctcggccctggtgaaagagcagagcaaaaaggcctgctgttcgcggcgacaccggcaagcgattttgtgtgcggcaccctgcagctggctgcgggcatgaatctgcaggtgtttacgacaggaaggggaacaccatacggcctggctgctgcgccggtgctgaaagtatcgacgcggcattccttatcagaacattgggctgatttaatcgatatcaatgccggccaaatcgcgacaggagaggccagtatcgaagacgtaggctgggaaatcttcagaacgattttggatgtggcaagcggccgaaaacaaacgtgggcagaccgttggggccttcataatgatttgtgcttgtttaatcctgctccagtgacttgattcatttttttatagcgattagatggaatatgatgtaaaatacaattaacgtataggaaacggaggggttacagcatggcattcattagattccgagtgacacgaattcaatagtgagcaactctcgcctgaatgcgggagaatcgggatgaatccgcctatgtatgagcccttatatggttattaaaaaagagggtggcgatgcctgccttcttttttctgcctccaaacatcccctctctctccttcagggcggagcatgagaaaggggaaatgggatgacaaaccttaccgaaaaacagatgatcacggagattgtcgggcttgcacgcagccaaggtttgacggttcattctgaggacgcgcaattgaatgaaaccggaatggactttcaagttgtatttgccaaggacgacacaggtatgccatgggtgctgcgaaaaccgcggcgaagtgatgttgtggaaagagcatctgcagaaggcataacgcttgcctttctccgcgcgaatctgactgctgatgtgccggattggagaattcacacgccggaattgatcgcttacccaatgttaaaaggaacgccggcggccgggattgatttggaacaaaagcaatatgtttggaatatgaatcatcagccgccatcagacgattttgtccgtacacttgctggcatactggctgaattacatggcacggatcaaatatctgctgggcaatccggaatagaagtgataaggccagaagatttcaggcaaatgacagcagactctatggttgatgtgaagaataagcttggcgtatctacgacgctttgggaaagatggcaaaagtggatagatgatgatgcatactggccgggtttctcttctttgatacacggcgatctccacccgccgcatatccttatcgatcaaaatggacgtgtcacaggacttctggattggacagaagcgaaggttgctgacccagccaaggattttgttctttatcaaaccattttcggagaaaaagaaactgcccgtttgcttgaatactatgatcaagcaggcggccgaatatgggcaaaaatgcaggaacacatttcagagatgcaggcggcgtatccggtggaaatcgccaagctagctctgcaaacacagcaggaggaacacatcaatatggcgctggaagcacttggtgtaacatcggattaagaattgacttcgtttcatgaaccgagtattataaactctacaaataatagaacggattaacaatcgtgaggaagagcaagtacgcatcagaatggaggttcagagagtcggtggcaggtgtgaaccgatcctcccctgatgccgaatgggcttctgaattgctttgctgaacggatagtaggcgatgccgggtttctctccccgttaccaagagaggagtatcgaaacataggttttctgtacttagagtgaacggctgtatagctgttaataaaggtggtaccgcgagaccctcgtcctttgcataggacgggggttttttgtgtttcttaaaggaggtgacggccaatggacgatggctggtggtggcatagcagatgagttagaaaggaggatatcaaatggtcattgcaactgatgatcttgaggtcgcatgtcctaaatgtgaaagagcgggagaaatcgaaggaacaccttgcccggcctgcagcggaaaaggtgttattctgactgctcaaggatatacgcttctggattttatccaaaagcatttgaataagtaaaggagaaaagctgagctgagatgagagcagaagagcagagtaagattcgtgaggccgcagcaggtacgatttttttgctgatcggaacagtttgttttgcgtctaaatcgatttggataaaatgggcataccaaatgggtgctgagccagatgccgtgctgctatataggcagctgctggctgttccgctgttttggctgatttttttaatatatcgtcctccaatgccagacggtaagaaaaaaggagacctatggaaggcttgtggcgcgggagtgttttgtttttttctgtctcccttgcttgattttatcgggctgaaccatgtatccgcaatggttgaacgtatattgctgatgagctatccgttgtttgtgtttggattcaccgcgtgtcgtgaccggaaaatgtcctcaattcaggaccttttcgcagttctggcggtcatgtttgggcttttcttggcgctgggcggctggaatgctgagcttttccaggcgaatatgattggagctgtattcattttgttatcttcggccgtctatgctggttatcttgtcctttccgggcatctcgtccatcaaatcggggggatccgtctcaatgcatacgggatgacagctgctggagctgccatgatgctttacacagggatcaaatcggcggctggcatgaatacgccaatggcagcatatccgctttctatgtatggtttgttcgcggtaattgcagtcgttaccacagtgattccatttgtgctaatgcttgagggcataaaacgaatcggggcacagcgagccgccgccatttcaatggcagggcctatcctgacgattttctatggagctttatttctcggtgaacggctcgggctcattcaagtcattggatgcggtgccgtattttttgtcattacggtgatggaatacaggaagctgaaaacaggaaaataagaataatttatataaaacacacacgtttttcaattacaataagtgtaattacgtgtgtgttttttgattttgtaaaggttaggtgagaagatgcagcgcatattgcttgtagaagacgaccactcaatcagtgaaatggtggatcattatttaacaaaagaaggctttggaattgtgcatgctttcgacggagaagagggcatccggctgtttcagcagggttcatacgatttggtcctccttgatatcatgctcccgaagctgaacggcatggattttctgaaaatcatccgggaaaaaagcaatataccggtcttaatgatttcggcaaaagacggagatgtggacaaggcattgggactgggttttggggcggatgatatcgccaaaccgttttcgatgattgagctgacagccagagtaaaagccgcgatacggcgggcgacgcaatattcggcagaggagccggctgtgaataaggtgatccggattcaccagcttgcgatagatatagacaatgtttccgttttgaaaaacggagagccgctccagctgacgtcaacagaatggcagctgctgtgcttatttgcatcaaatcctaaaaaagtgtttacgaaagaacaaatctaccgttccgtttggaatgaagagtactttgatgatcagaacatcattaacgtacatatgcggcggctcagagaaaagattgaggatgacccctcctcccctcaatatattaaaacgctatggggcatcggttataaattaggagagttttagaatgacagtgctatgggtggccgctgtcatcgctctggcgtgtctgaatgtgattcaattcataatgaaaaagaagcgggacgggaatctggcttacacggctgaccagcttagctacatgctcagccgggattcggcaggacaaattttgcttcctacagacgatcatgcgctcaaaggcttgcttgttaacatcaatcttatcgttgagaatcgtcagcagatcagcgctcgatttgccaaaacagagcaatccatgaagcggatgctgaccaatatgtcgcacgacctgaaaacgccgttaacggtcattctcggttatatcgaagccattcaaagtgacccgaacatgccggacgaagagcgggaaagattgctggggaagctccgccagaaaacaaatgaactcattcagatgatcaactccttttttgatttagcgaaattagaatctgaagataaagagatcccgattaccaaagtacatatgaacgacatatgcaaacgaaatatcctgcactattatgacgctgttcagtcaaaaggctttcaagcagccatcgatataccggatacgccggtgtatgcgcaggcgaatgaagaggcactggacagaatcctacaaaacctattatccaatgcgattcaatatggcgcggttggcaagttaatcggcatgacgctgtcttatgatgagaggaacatcgccatcaccgtatgggatcgcggaaaagggattagtgaaaccgatcagcagcgggtgtttgagaggctgtacacacttgaagaatccagaaataaagcatttcaaggaagcggcctgggtttaaccatcacaaaacggcttacagaaaaaatgggaggcaccatatccgtccaaagcaagccgtacgaacggactgcatttacgatcacattgaaacgcatgacatattaatcgtaagaatttcttaaggtttgagaaataaaaatgacagggctcgccgctacaatagaaaacaggaaaagagagggaaggagaaacaaagttgacttatatcgtacaaacaaacgggctgaccaaaacgtatcagggcaaagaggtcgtatccaatgtcagcatgcatattaaaaaaggtgaaatctacggctttctcggcccgaacggcgcggggaaaacaaccattatgaaaatgctaacgagccttgtcaaaccgacaagcggtgaaatcatcatccttgggaacaagttcacccacacgtcatatgaggtgctggggaacatcggcagcatgattgaatatccgattttttatgaaaacctgacagctgaagaaaatttagatctgcattgtgaatatatgggataccacaataaaaaagccatacaagaagtgctggatatggtgaatttaaaacaaatcgacaaaaaacccgtcaaaaccttttccctcgggatgaagcagcgccttggaattgcgcgtgccatcctcacgaagccggacctgctcattctggatgagccggtgaatggtcttgaccctatcggcattaaaaagatcaggcaattgtttcaagtgctgagcaaagagtacgggatgacgctgctgatctcaagccacctgctgggtgaaatcgaacaaatcgcggacacaatcggcgtcattcgggacggcaggctgcttgaagaggtatcaatggaggatgtcaggggccagaacactgaatacatcgagcttgttacgccgaatcagacaagggcctgctttgtgctggagaaagagctgcaattaaccaactttaaaattttaaatgagaaaacaatccgaatttacgaggctgaagcctctcaggctgccatatccaaagcattgattttaaatgatgtagacattgaatcaatgaacaaaaagtatacgtcgctggaggattattttatcaaattgatcaacggcaatagcatcagtgcgtaaaggaggagagacacgttgatgaatttgatcagaatcgaattaagaaaaatgaaaatgggctggtatatgagaggtgccctcattgccaacgtgatcattatgggttttatgtggctgatcagttattccgaaaaagccgatggcggggtttcgttccaaagtacggatgaagcattcctcatcatcggcaccttcgtcagagcggtatttatcgtatttggcgctgtgctgatcgtaaaattggtgatttcggaatataaaaacaaaaccattcttgtgatgttcacgtacccgatcagccgtaaaaagctgctcaccgctaagctcatgatcgcgggcggactgacgtttatcacgattttactttcaaatatactcatagccgccggtttcttttggctgaactcgatctgccatttcataccgggagagcttacttccgagatcatttctcaacaggcggtcaaaatggcggttttcgcttttggcgccgctggaaccagtttagttcccatcttttttgggatgcgtagacactcggttccggcgaccatcatttcatctgtagtaattgtgatgctcatcagctcaacaagtccgggcttctcgatttcatctgttgtgtatatcccgttatcgttagcggcattcggattgttcttttcctacatggcgatcaggaatgcggacaagcaggatgcgtaaacaaaagcgcccaatatgtataaaaggccgatgctgtcagcatcggcctttccattatgagtctgttcttgtttcaagataatgcttcttgccaatctctttgctcatcatatagaaatggaagcaatattcaccgattgccatgacgatcgcgccgaataaagccgccaacgcaacttcaccgccagtcatccctagggaaagcggcatgcccatcagccagatcacaagaaaggccaagccaaaatcagccaaagttgcaatcatattattccatctcggcaatacataaagatcgcccagcaaataagaaataacccctaacacaatcgtcattagcagcgtatcaccaaacgtgaaaccaaagcccagaccaagcaccagatacaacacaataatcgtcataatacctttaatcgcgagcgctttcacatgtgtcattacaattcctccttttgtcatttgatttgttatgtataattcctcaaatgtaaaaagttaaaccttatttcttttcggaggcgggtgcaaatctgctggggaggggtcaatgatgtgaatccaggaattgaggctgcggcgcttcgacagcggaaacgtgaagcttgtactgcaccggacgctgctttgatgcccaacagcccattatgtttgctgtttttagatgaataaatttaaaaacttctcctgtccctccgtcatcacttctgaagtaatgaaatatgatgaaaagagatcaaggggaggtgacgtgatggcggtcgtgagagcaacgagtgcggatgtcgatttgatggcaaggctgctcagagcggaagcggaaggcgaaggcaagcaggggatgctgcttgtcggcaacgttggaattaatcggctgcgggcgaattgctcagattttaaaggcctccgcaccatcaggcagatgatttatcagccacacgcgtttgaggctgtgactcatggatatttttatcaaagggcgcgagatagcgagcgtgcccttgcacgccggtcgattaatggtgaaaggcgctggccggcaaaatttagtttgtggtacttcaggccggagggagactgtccagcccagtggtataaccagccgtttgtggccagatttaagtcacactgcttttatcagccgacggcggagacgtgtgaaaatgtatataacacattttagagacaggacaccgttcaaattgaacggtgtttttatttgaaaagatgcaatggaaaatattcctgtgagataatcgaagaaaaaagagctgacggagatgacagaatggcaacaattgacctgcaaaagaaaagtgtaaagatcgtactggagaaaaagcagttaacgaaggtgacggctcgtgtcggactggttcttgatattacgggatcgatgagaccgctctacaaaaacgggacggttcaaaatgtggtggagcggattttggcagtggctgatcagtttgatgataacggtttgctggatgtatgggtgtatgataatgaattttcccgattaaagccagtttcagaaaaggatttttcgggctatgtcgatcgtgaaattttaaataatgaccgcttgcataaattcggcagaaatgatgagtcgccagtcatgaaggacgtgctgcgcaaatatgttacggaggaaccgagctcgtatcctgctttcattgtttttatcaatgacgggggctgtaaaaagtcaatcaaaccgataattgaagcttcttctgataaaccggtgttctggcagtttgtcggcatcggaaacggaaactttgattttctcaataaactggatacgttagaagggcgtgtcattgataacacgaacttcctgcatatcgaagagattgaccgcatttctgatgatgagctttatgatgctctgcttgctgaatttccattttggctgaaagaagcgaaggaaaaagggattgtaagagaacaagagcctcctgctgaaaagccgaaaaagaagggctttttcagcagattgttttcgaaataactgataaggcactgagccattctgcgaaatggctcggtgtttttgtttttttaagatcatgtgaagaaaaatagtccaaatgggcggcttgcaaacgacaggatatgcagaaaacgcgtcattcagccagctttcggcatgttttagcggcaggcttgtgagggaagacctgtttttgatgttcagcgcttacaatcagttcacacttcttcacagtcgtttaacaatgatttcctataatggagacgatcaatgaggagagaggggatcttgaatggcatacgacagtcgttttgatgaatgggtacagaaactgaaagaggaaagctttcaaaacaatacgtttgaccgccgtaaatttattcaaggagcggggaagattgcaggactttctcttggattaacgattgcccagtcggttggggcctttgaagtaaatgctgcgcctaaattctcaagctatccgtttacattaggggtagcgtcaggtgatccgctttctgacagtgtcgtgctctggacgcgcctggcacctgatccgctgaatggcgggggaatgccgaagcaagcagtgcctgtcaaatgggaggtcgcaaaggatgagcatttccgcaaaatcgtaagaaaaggcactgaaatggctaaaccgagtcttgcccattccgttcatgtggaagcggacgggcttgagccaaacaaagtgtactattaccgtttcaaaaccggccatgaactaagccctgtcggaaaaacaaaaacactgcctgcccctggcgccaatgtgccgcaaatgacctttgcatttgcttcctgccagcaatatgagcacggatattatacggcctacaagcatatggcaaaggaaaagcttgatcttgtcttccatctcggtgattacatatatgaatacggcccaaatgaatatgtatcaaaaacaggcaatgtccgcacgcacaacagcgcggaaatcattacgctgcaagactatcggaaccgtcacgctcaataccgttctgacgccaatcttaaagctgcacatgcggcattcccttgggttgtaacttgggatgaccatgaagttgaaaacaactatgccaataaaatacctgaaaaaggacagtcggttgaagcattcgtgctccgccgcgcggcagcataccaggcatactatgaacatatgccgctccgcatttcctctttgccgaatggcccagatatgcagctgtaccggcactttacgtacggaaacctggcgtccttcaatgtgcttgatacccgccagtacagggacgaccaagccaataacgacggcaataagccgccttctgatgaatcgcgcaatccgaatcggaccctgcttggaaaagaacaggagcagtggctcttcaacaatttgggcagctcgactgcccactggaatgtgctggcgcagcagattttctttgccaagtggaatttcgggacaagcgcaagcccgatctacagcatggattcgtgggacggctacccggctcagcgcgaacgggtgatcaatttcattaaaagcaaaaatctgaataatgttgtcgtactgacaggtgatgtacacgcaagctgggcatcgaatttgcatgtcgatttcgagaagacaagttcaaaaatattcggagccgaatttgtcggaacctcgatcacatccggaggaaacggcgccgataagcgggcggatacggaccaaattttaaaagaaaatccgcacatcaagttctttaacgactatcgcggatatgtccgctgtacagtgacgcctcaccagtggaaagccgattatcgggtgatgccgtttgtgaccgagccgggcgcagccatttccacgcgggcttcattcgtttaccagaaagaccaaactgggttgagaaaggtatcatccacaacaatccaaggcggggtgaagcaatccgatgaggtcgaagaggatcgtttctttgcgcacaacaaagcccacgaaaaacaaatgattaagaagcgggcaaaaatcacgaattaaggagtggaaattatgttttcaaacattggaataccgggcttgattctgatcttcgtcatcgccctcattatttttggcccttccaagctgccggaaatcgggcgtgccgccggacggacactgctggaatttaaaagcgccacaaaatcacttgtgtctggtgatgaaaaagaagagaaatcagctgagctgacagcggtaaagcaggacaaaaacgcgggctgaatgctgatgaggcagacaccgggtctgcctctttttttatgaaagggagggcttttttgaatggataaaaaagaaacccatttgatcgggcatttagaagagcttcgccgccggattatcgtaaccctcgcggcattttttctatttctcatcacggcttttttgttcgtacaggacatttatgactggctaatcagggatttggatggaaagctggctgtgcttgggccgagtgaaatcctctgggtgtatatgatgctttccggcatttgtgccattgcggcttctatccctgttgccgcgtaccagctgtggcgtttcgttgcaccggcgctgacgaaaacggagcgcaaggtgacgctcatgtacataccaggtttatttgcgttgtttttggcgggcatctccttcggatactttgtcttgtttccgatcgtgctcagctttttgactcatttatcctccggccactttgaaacgatgtttacggctgaccgctactttcggtttatggtgaatttgagcctgccgttcggcttcttgtttgagatgcccttggtggtgatgtttttaacaaggctgggcatcttaaatccttacagactggccaaagcgagaaagctgtcctattttctgctgattgtcgtatctatattgattacaccgcctgattttatttctgattttctcgtgatgatcccgcttcttgtcctgtttgaagtgagtgtcaccctatcggcgtttgtctacaaaaagaggctgagggaagaaacagcggcggccgcttagtgcagcgtaccgcccggtgacttcacatcctcatcatattgtgcggccgtaacagcggcgattctcaatgcccggacaatcgtgtccaggctgaggctcggcgctgttttgtcgattgtttgctgcggaatgtaaggaatatgaataaaaccgccgcgaatgtgcggggatgtccggctaatgtgatccattaacccgtagaacaaatagttgcatacaaaggtccccgctgtgtaggaaaccgcagctggaatgccgtgttccttcatcttagcagttattcgtttcacgggaagccctgtccagtaagcggcgggcccatctggagaaatctcttcatcaatcggctgatgtccttcgttatcggggattcgcgcatctgcaaggttgatcgccacccgttccggtgtaatctgcatccgtcctcctgcttggccgacacaaatcacgatatctggctgatgtgtttgaatggcttggcgcagagtgcccagagcggatctaaagacggttggaatttgttccgctgtaataatggcttcttccgtctcgaagccattaagccgtttcgccgcttcccatgatggattgacggtttctttgtcaaaagggtcaaaaccagtgatcagcactttttttctcatcttctcatctcctttttcttttattctattgtttatttatgggtttttcatcaaaataatgtaaaggagtgaatcataatggagcatttaccgcagcagtatcgtcatttattcccaaccttgcagacgcatacgatgcttgccagctgttctcagagcgcattggcagagcctgtatcaagggcgatccaggattatcatgacagcctgctgtataaagggacgaactggaaagaagcgattgaaaaaacagagtttgcgagaaacgagtttgcaaagctgatcggggctgaaccggatgaagtggcgattgtgccgtcagtttctgatgcactggtttctgtagcatcgtccttaactgcatttggaaagaagcacgttgtatatacagatatggattttccggcggtgcctcatgtttggcaggcacactccgattataccgtatccgtcattccatcaatagacggcgtgctgccgcttgaacaatatgaaacgcatatttcggatgaaacagtactgacgtgtgttcctcacgttcattatcgtgacggctatgttcaggatataaaagcgattgccgagatttctcagagaaagggctctttattgtttgtagatgcttatcaatcagccgggcatattcccattgatgtgaaggaatggggcgtagatatgctggcagcaggcacccggaagtatttgctcggcataccgggtgtggcgtttctttatgtgagaaaggagctggctgacgcactgaaaccgaaagcatcagcttggttcggcagagagaacggatttgatggggcttatgcgaaaggcgcgcgtcgttttcaaacgggcaccccagcttttatcagcgtatacgcagctgcagcggctttatcgctgctgaatcatattggggtttctcatatcagggatcatgtgaaaacgatctgtgccgatgcagttcaatatgccgctgaaaaaggcctgcagctggcggcggcacaaggtgggggtcagccgggcatggttgcgatccgggatgagcgggcatcggaaacggcggcgttgctgaagaagaaaaaagtgatttgcgcgccgcgggaaaatgtgatccgtctcgctccccatttttataatacgaaggaggaaatgcggcgcgcgattgatgaaatcgcggcgaaaacgatccacaagtaaacataaaaaaagcccctgaacattagtcaggggcttttcatattaatgatctaccttcacgcgcttcataaagaaagcgccaattaaaccgataatggcaacaatcattgcaaacacaaatgcgtgctgtacacccgctgtcaaagcttgcgggatgactgccggatcggcagggtttttaactgtactcatataatcatgctggcctgcagccataatgctgaccgcaaccgctgttccgatagcgccagccatttgctgcagcgtgttcataatggcggtgccgtctggataaaattcgcgcggcagttggtttaaaccgtttgtctgtgcaggcatcatgatcatagaaatcccgatcatcaagcaggtgtgcaggatgataatcagcacagctgttgaagtggtcgtgacatttgagaagaaccatagtacaacggtgacaatcacaaatcccggaatgacaagccatttcggcccgtatttatcgaacaagcggcctgtaacaggggacataaatccatttaaaataccgcccggcaagagaacaagaccagatgcaaatgcagtgaggactaagccgccttgcagatacatcggcagaagcagcatagatgacagaatgaccatcatacaaatgaacaccatgatcacacccaaaataaacatcgggtatttgaacgcacggaggttcatcatcggctgcttcattgtcagctggcggattgaaaataggataaggccgacaacgccgacaatcagcgacacgataacagtcgggctggaccatcccccggagccttcacccgcgttgctgaatccgaacacaatgccgccgaagccaatcgtcgacaggatgatagacaatacatcgattttcggctttgtcgtttcagatacattctgcatatatgcgataccgaaaacaagcgccagcacaaggaatggaagagagatccagaaaatccagtgccagttgagatgctccagaaccaatcctgagaaagtcgggccgatggcgggcgcgaacataatgacaagcccgatcgttcccattgcggcgccccgtttatgaggcgggaaaatcaccaagattgtgttaaacatcagcggcagtaaaagaccggttccaagtgcctgaacgatccttgccgccaataaaaacgggaagcttggcgcgagtgccgcgatcaaggttcctataattgaaaagattagtgacacggtaaaaagctgtcttgttgtgaaccactgcaacagcagtcctgaaacaggaacaaggataccgagtacaagcaggtagcccgtcgttaaccattggacggttgccgctgtaatgttcaattccttcataaggtcggttaacgcaatattcagtgctgtttcactgaacatgccgataaaaccggccaacagcaaggaaatcataatcggcatcactttgtattgctgagatgctttagctgttgtttccaaaatcatttcccctctctatcaactgcatgtagtatgtcgtttttttatctcttcagcaggtcaggaatgcagctggagatatgaaggagcggcgtactgttttttgccgtcaaagataaaagaatgccgccttcaatcatcgcgttaaccacagtgctggcttcttttgcacggttctcgctgcagccagtctgccgcagtttttcctcatatacagaggcccattctttgtaggcttcatgacaggcttcgcgcaacggttcgcttttcaatgacgtctcagccgctagcaagcccacaggcaagccttcaatgtcttccgtacatgaaaactggcaggagagctccttcaaaaaggcttgaatgccttccgctggatcggtgcaggcttccatgcagtccgcgattttctgacggatatactccttcatctcattcacggcttcgatcgcaagctgttctttacccccgggaaagtggtagtaaagagagcctttaggcgcgccgctttcctttataatctggttcagccccgtgccgtaatacccttgcagctgaaaaagccgggtagctgccgaaaggattttctcacgggaatctccataactcataacattcccaccttactgaattgcaatcaaaaatatagtgactggtctattatcttgattcaatcatcaattgtcaagaaaaattcattgtatgaaaagacaaaaaaagaaggatatgacaacaaaaaatactgagagaaaagctgactgatcttttgactgaatagataaaatgtacaatgattaatcatcatatggatgtaaggagagaaatagatgaaaaaacaacgaatgctcgtactttttaccgcactattgtttgtttttaccggatgttcacattctcctgaaacaaaagaatccccgaaagaaaaaacgcagacacaaaaagtctcttcggcttctgcctctgaaaaaaaggatctgccaaacattaaaattttagcgacaggaggcacgatagctggtgccgatcaatcgaaaacctcaacaactgaatataaagcaggtgttgtcggcgttgaatcactgatcgaggcagttccagaaatgaaggacattgcaaacgtcagcggcgagcagattgttaacgtcggcagcacaaatattgataataaaatattgctgaagctggcgaaacgcatcaacgacttgctcgcttcagatgatgtagacggaatcgtcgtgactcatggaacagatacattggaggaaaccgcttattttttgaatcttaccgtgaaaagtgataaaccggttgttattgtcggttcgatgagaccttccacagccatcagcgctgatgggccttctaacctgtacaatgcagtgaaagtggcaggtgcccctgaggcaaaagggaaagggacgcttgttgttcttaacgaccggattgcctcagcccgatatgtcaccaaaacaaacacaaccacaacagatacatttaaatcagaagaaatgggcttcgtcggaacaattgcagatgatatctattttaataatgagattactcgtaagcatacgaaggacacggatttctcggtttctaatcttgatgagctgccgcaggttgacattatctatggataccaaaatgacggaagctacctgtttgacgctgctgtaaaagccggagcaaaggggattgtatttgccggttctgggaacgggtctttatctgacgcagccgaaaaaggggcggacagcgcagtcaaaaaaggcgtcacagtggtgcgctctacccgcacgggaaatggtgtcgtcacaccaaaccaagactatgcggaaaaggacctgctggcatcgaactctttaaacccccaaaaagcacggatgttgctgatgcttgcgcttaccaaaacaaatgatcctcaaaaaatccaagcttatttcaatgagtattgaagaaaagaaggcgaataagccttctttttttggctttttaggaccaataatgacctctgaatcttaaaatttctttaaaaataagccaaaattaccctttacttaattaatttggtaacgtaatataattgaagaatttgttacaaaaaaaggaggatattatgaaatttgtaaaaagaaggatcattgcacttgtaacaattttgatgctgtctgttacatcgctgtttgcgttgcagccgtcagtaaaagccgctgaacacaatccagtcgttatggttcacggcattggaggggcatcattcaattttgcgggaattaagagctatctcgtatctcagggctggtcgcgggacaagctgtatgcagttgatttttgggacaagacaggcacaaattataacaatggcccggtattatcacgatttgtgcaaaaggttttagatgaaacgggtgcgaaaaaagtggatattgtcgctcacagtatggggggcgcgaacacactttactacataaaaaatctggacggcggaaataaagttgaaaacgtcgtgacgcttggcggcgccaaccgtttgacgacaggcaaggcgcttccgggaacagatccaaatcaaaagattttatacacatccatttacagcagtgccgatatgattgtcatgaattatttatcaagattagacggtgctagaaacgttcaaatccatggcgttggacacatcggccttctgtacagcagccaagtcaacagcctgattaaagaagggctgaacggcgggggccagaatacaaactaatgagataaataaccttgaagagtcctattcttcaaggttattctgctttcagcacaatggttttcgccgccatatcatgaacggtttgttttttcttcgtaaatgcggctgtcaaatagatcaggcgggagaatacatgcacccacgctatgatgtaacggacaatcgcctgtaggaaagaaattttctcgtgtgtttcgtccctcacgatttgcagcccgatgatttttttgcccagtgtgcccttccaatttgtcagcggcatcagcaaaggatacacaatcagcatcaatatggcgacaataatgacaccagcggacccatcgccaaacgtaaatccggctgccaaaatcactgctgcggcaatgattacatcaagtaaaagagcgcaggcgcgcagcatgaaaccagctagttccaatagaaacactccttaaaatgttaaataaacacctaatgattgtaaaaaagaagggcctaaagtgggaataggtgataagccttaaatcacaaaagttggtgaaaatgtcataggtaaattggcataatcagccagcttatcacattaccaaattcttttttagcccgaaaccaagccctcagaagttatttttgttaaaatagaaaagttacaacagaattcggagggtttattgtgggaaaagtgaaacgaaatgccccttgcccatgcggcagcggcaagaaatataaaaaatgctgcggaagtaaagttgtcgacttcccggcggaactagcggcaaaagaagcgaaacaaattcaggaagacttagtggagtatgccttcacagtacatagagaaagcatttcaggctttatcaaccagcatgattttctttctgctatggacagacagacgaaagacatcagcgtatttaacttaggaatctggggaatcttcttccacccgcttgctggtgagaagacaatcttcgaagagtaccttcagaaaaaaggcgattcgatcactcgtccgaaaacgcgtgagatcgtagaatcatggcagagcatgacgcctgctttattgctgctgaaggacctgaaggaaggcatcattcactttgaagatgtcattacggcaaaacaattcgaagtggaaatggacgccagcaatcaagaccttcctccagtgggaagcctgattcttggatacccaatccacgaagcggaaaaagcagaattcttcatgcagttcacgatcttcccggtgaagagaacagaagcgctgatcagcaaggtgaagaaatatgcggatgccgctgtgaaggacggcaaaacgccggaggacttcatgaagcaggaattcaacaacgttctgttcgcgttgttagctgagaaagatgaagagccacaagcagagaaagcggaagtaagcactgttgagtgggcaaacgacttggagaaagaaaccgctgcggctattgaagaaggcatgagcggggaagagtatccgactgaattgatcccagctgttattgacatctggaaaacattctgcgagaaaaaatcacctgtcatcagaaagccggaagcttttgcggcggcagttgaatattatgtaaacgcaatttctcttaacggcgcgtccgtttcccaggctaaactggcgaaaaaatacggcgttagcgcatcaacgatttccagccgttacaaagaaattgaaagcacgctgcaagatgaagcagatcgttttgcacaagcgttatcctcataatggaaaaaaccttgaaaagccaggcttttcaaggtttttttatttctgaaacggaattttgatttctaaccggaagacggggtggcggtaggtaaaatccagcctgccaaaagcgctcttcaccagtttttgaatgatatatgtgcccatgccttcatgagcgccgtttttcgttgagcggccaaacgattgataaattgtatcgagcacttttgggtccatcccgggagtgctgttttcacaagtcagtacataaagtccgctgcgcagtgaagtttccagtttaatctctgctttttctcgggcctccgctgcgctgtcgagcgcattttctaatatgttgccgaccaagctgacctgatcagcaggcgaaaacggaagggaagaaagcggtgtatgcatatgcagcgaaacactcacattcgaggcgcgggctttttctaaaaaatcataaagcacccctgcaacgtacgcgttctctcctttcaaaaaacggtcatattggctgtattgatccgcccagttttgaatatatgcttgtgtatctgccttgggctgagctgatttgattgcagtgatatgtttcattgtgtcatgattctggcttctgacatcaatcagcatttgattggcgtgctgttcagcttgagtcagcttatcaatttgatcagaaagccttgcctgcaaagcagactgtccgatacggagcccttcacaccctgcaaatatcgcgattacacataataccggcatgatgtctgtgccaatcaacactactcccgccgacatcacttgaatcacagcaatccacgcacaaagccctgaggaacagtgtttccacacccgcttcgtattccaaatgtacaatcctgcagcagctgcgcctaaagcagcggcgagccaagaggcggctgtgctgtgtgaaaaagcagcagctccctgataacatatgaaactaaataaaaccagataaagacattgaaaaagggtaatcacgttctgaactcctcaaaagtagtagttttgaaaataatcaagctgctgcttggtgatcatcgcttttttagacgttccctcaaaagaaactgtaaatgaatgcttggtataagcggaaaaatgctttatgtaatgaatgttgataataaaggaacgatgcgaacgaagaaaatccttttcgggcaggtcgcctttaatatcatttaatgtttgatacgtttgcacctcttcggcggttgtcacaatcgtcgtcgaacgtcccgtccgttctgcgaaaataatatccttcttttgcaggacatgcatttcagacttttgctttatcaatatacgcccattcaaactcgtttccgttttctttttcaagtaccggtcgaaggaagcggccagacggtcggcatagtacggcttcataatataatcatggacgttcaggtcaaaggcgtgaaccgcataaccgccgtggccggtaacaaaaatcacatccacatcaagtgaatgggatttgatcaaatcagcaagctcgtagccagacatatggggcatctcgatatcggcaagcagcagatcaatgtctccgttctttacccgcctgtaggcttccttcgctgaatcggtggaaaagacaatttcgacgtcctgcattctggacacgatcgcttccagcttctctaaatctactcgataatcatctacaagtccgacttttaccattatcattcccctagttacatagaatcatctttattctatcccatttcgcgacataaaaagaactcttcgcgacaactttatccaactaatccagcttttcgtatatagtcattactagaaataaagataagggagattgtgacatgattacactgaccgattgcagccgcaggtttcaggataagaaaaaagtagtcaaagcggtgcgagatgtaagtttaacaattgaaaaaggagaagtcgtcggcattctcggagaaaacggtgccggcaaaacgacgatgctgagaatgattgcttccttgcttgaaccatcacagggtgtaatcacagtagacggctttgacacggtcaagcagccggctgaagtcaaaaaaagaatcggtgtcttattcggaggagaaaccgggctttacgacaggatgaccgctaaagaaaatctccaatacttcggcaggctgtatgggctgaaccgccacgagatcaaagcaagaatagaagatttatcgaaacggttcggcatgcgcgattatatgaaccggagagtgggcgggttttcgaaagggatgaggcagaaagtcgccattgccagagcgctgattcacgatccggacatcattttatttgatgagccgacaactgggcttgatattacgtcaagcaacatcttccgcgaatttatacagcagctgaaaagagaacaaaaaacgattcttttctccagccacattatggaggaagtgcaggcgctctgtgacagtgtcatcatgattcacagcggagaggtgatttaccgaggggcgcttgaatcactatacgagagcgagcgcagtgaggatttgaattacatctttatgtctaagcttgtcagggggatttcttaaatgctgagccatatttataaaaaagaaatgatcgacgctttgcgcgacagaaaaacgattttactcacaatcttagtgccgatgattatgatgcttggacttgtcttcttttatgaaagcatgctgtccgacaaaggggagcagtacacgctggctgtcggccattcgctgccgcccgcactggaaagcaagcttaatgagattgacgaaatcagcgtaaaaacatttgcaaagcctgaagaggcagttgatgaaggaaaagcagatgcctatctgaacgtcccaaaagagttcgactcatatgtcaacagcatgacaccttttaaggttgatgtttacggcaattcaatcgatcaagggtcgtcaaatgccatgcagcttgtgcagtctgccttagatcagtacaaaaatgaaattgtgcagcaacgtttaacaaataagcatattgatcaatcggtgatccagccgtttacaattcagcaaaaggaagcggatgaggagaaagggacttccgctattatgctttccgccattctgcccatgctgattctgacttccattgtttccggcgcaatgccgatcgctcttgatatcatggccggtgaaaaggaccgaaagtcaatcgaggcgctgctattaacgccagtcagcagaaacaaaatgctggtcggcaagtggcttgcggtttccacttttggcgtggcttcaggtgtattggctttgatgtttttgattttgtccaccgtgttatttaccgaaaatttaaaaacggccttccagctgggagatcatatgtggagtgtaatcggcgcttcagccttaatcattgtgctctctgcattgctgatatctgcgatggagcttttcatcagcatcatgtccagctcggtaaaagaagcgcaaagttatatgtctctcgtcgtctttctgcctgtgttcccgatgtttttcatcttcagcaaggcaccgaaccaatttgacttatcatactttctcatcccgtttctgaacctgcatgcgttatttaaacagcttttattcgggatggttgacccggctgccattttgtctacgtcaggaaccatcgccgtgctcatcgccatcttctttttactagccagagcctgcttcctgaaagacaaatgggttcttccaaaataaacttgcgaaaggagaaatacactttctcctttttgtatatcctgaaaaaagaaggaaaatagaaaaaggatatctaatacaaaaagtgaccctgcactatttttcatcaaaattggtttcaaaggagaaggaacaatggatcaaacacgtacactcggcaaaacgaagctgaaggtgaagcggatcggattcggcgcgaatgcggtcggcgggcataatctatttccaaatctaaatgatgaaacagggaaggatttagtgcgcacggcattggatggcggcgtcaattttatcgataccgcctttatatatggattggggagatctgaagaattaatcggcgaagtcgtacaggaacgcggcgtgcggaatgagctcatcatcgccaccaaaggagctcataaagaagtggacggcagcattgaattagacaatagccgggagtttcttcgcagcgaggtcgagaagagcctgaagcggctgaaaacagattacattgatttgtattatgttcactttccggatggaaaaacacctctcgctgaagtggcgggcactttgaaagagttgaaggatgaggggaaaatcaaagcaatcggcgcttcgaacctcgattatcagcaattgcaggattttaatgctgatggctatttggaggtcttccaggccgaatattctctcatacagcgtgatgccgagaaagagcttcttccatactgtgaaaaacaaggcatctcctttattccttactttccgcttgcgtccggactgctgacaggaaaattcacgcgagacacagtctttgatgatttcagaaaggataaacctcaatttcagggtgaaacgtttatccacaatctcaaaaaaatagataagctgaaagcagtagcggaggaaaaacaagcggatacggcacatgtcgccttggcgtggctgttaacgagaccggcgattgatgccattattccaggagctaaacgacctgagcaattacaggataacctgaaaaccttgaacattgaactcaccgaagacgaagtgaatttcatcagcgacatttttaaataaaaaggaaatagccgtcaaggctatttccttttggtgttttattctttgatgaatgcttcgactaattctgctgctctgtaatcatccatatcaagctgccattggtcgatgtcatttttcttcattttcacttcaactgttttttcagatgaagcaggtccaagctttttaaattcctcagggtagacttgaagcgcgtatttcactgcctcttcatagctggcactagagtttttactgtagtagtctttcactttgtcttcgatacggtctgaaagagaagatgcatctacaggtttaactgttgcttcaacaattgcttcgtctttagagattgaagtcgtttttgcttgaatggaagagtttttgcttaatccctctttaatgccgttcacgatattatcaagcgctttgctgtccgcatatgtgctggaaaggccggaagctgagagataaccgtctttggctgattcattgaaatcatttacaatttcatttttgttagcgccggtgattttttcgaaatcggcgttatctttgccgaaaagaaggacatcaacataagctgataacgcttttgcagaatcttggagcttatctgccgtcgccaggatttttttgtcttttccgtcaattttaaaagtaactgattttggctttttatcaccgtaagattccggcgtatagttaagctcgtattgcttgcctttatctacaacgaagaaaagatttccttcaacggatttgtcagcgttaatcgtgctgccttgaagcttttcgctatagtcttcagggtctgtgtcagacattttggtatcaccttgatacaatgtgaaatccatactgtctacattcagcgggtcttttcctgtgtttttcaccgcgacattgacttttaacacaagctggtcatctgaagtggacttatcatatttagacggaagtgtgtaagagacatccttgattttgacttgagctatatctgagcttttttctgtttctgattctttcttctccgcgcttgttttgctgccggaacaagcagctgtaaacatcatcagcagaagaattaggaaaacagcgtacgtttttttctgaaacattcatttttcctcctcaaatggtttaggaaaggggagtcttttgtctttgagaaatggatctttttgaatggattagcatcatataaccaaaaaaatcagttcttttctcacggtttttaccggattttctggaaactccgccctcctttgtcatgaatggacctataaaaagttacaacggaattaattttaagattattagcttttatattgaataggttcatcatcctatttttggtgaaaaatgttctggtaaaactggtaaactcagaaaactgtgtattttagactattactttttgattagttggagggaacttaagaaggatgaaaggggctgcctttgtgaagaaagagggactgaaacaaaaagcactggaaatcggccgggtgccgacacacttaaaactggaaattgaagattatggcggtgatgacaaaagagcctatttttgttggagagatcctcaggatgagaatatcggcattatcgtggaacttggaccggacggggagctggaatccctttcccgtgatattgagcctgaaagcggagaaaggctgtctgaggagaaactagaggatatcatgcgccaatttgtcgagactcatcatccgggggcactctctgcctttgttcgtgaagaaaatgaccgtgcatacggcgataaagtgagattttcatatgttcaaatggaggctgggcttcctctccccatgagcggatttatggctgatgtttccttatcaggtgagatcgtttacttccgctattacggcgaagcaggcagcatcatcaagccaaagagggtcgcggatgttgaagaggcacttgcctttatcaagaaggacgtagagttcgaccttttgtttgaggttctccatcgttctgtttacaaaaatggagatgatcagccacatttggtgtatgagcctgaatgtagggcgattaccgtacctgcggatttggttcaagaagaacaaggaggagttgatgatgacgataattacagggagcctgagagctttcctctccctttattcgagggcatccgcgaaaaggccgatcctgacagcatgattggtattgaaaatgggtttgtcaaagagcgggaagcggatttgggagatgggagaatcggaatcgtttggcggaatccggatgaccctgtgtatcagccggcggataaaagcatggacagctggtttaagggacggactcatcaagtgctgaaaaccatctataacaaagaaaccggaaaactcgaaggcgtcatgtcatttatggaggaaaaagggccgctgacagtaactttggcagagtgcgaaaaaattgcgcttcgctttctgtttgctttatttccgaatgccgatcaatattttaggatcagatacgatgaaaaggatgaagaagaaaacgcagtcactgtttttacatttgaaacgcattgtcacggagttccgctccgatttgggcagatcaaaatttgtgtcagccgccagacagggtatatcaccgtttatatgggaccggatattgacccaaatgagctggcaaccattgatcctgtgccggccatttcagttgaacaagccaaggctatcttttggcagcattttaaagttgagcttggctgggaaagagagtacggagatgatgaagaacacagctaccggctcgtctataagccggtgtatccgcgttttatcgatgcacatacaggagagcctgtcttcagctcatggtaaaacagccaaaagtcacgcaattgcctcaggtatagaagagagtacgtgatgaaagtaacagaaagaatctcgaaaaacaatgacaataatagaaaaggacctttcttcactttaaaagaagaaaggtctttttatataataaacaggattctctttgtcgtagactctttgaaagggatgacttcattggttaataaacagctgaaaaagatggcgcaggagatcggaaatgtaccgacgcattatgagcttgagatagaagattacgaccaaaagcaaaagaagaacgggcaggcatattttatctggaaggaccctaaagatccggaaaggcacattacagttgaacttagaaatgacggcgctttgctcaccttttcaacaactgtccgctccgagacagacaaaaaacttccagatgctgagctgaagctgacggctcttcagtttgccgctgcccatcatcccggcacatttatgaattttcattttcaaggcaaggaagaacgggggcagcacatccggtttgtctataccaaaatggagctggggcttccgattcccaattcaggctttttaattgatatgacacgcagcggtcagattgtccactttctatattacggggaagggcataaagccgaagttccgacggaatttgtagcaaaagagaaggttgtgtcccattacttaaacacaatgtcttttgagctgatgtacgatgtcattgatggcgaacaggaaccaaggcttgtatatgaaccgattctcccgggatacagctatcccgcagatgtagacgaaattgtgcccgatcagcatatcgcagatgaaagaatagaaaacacggcgtcactgccgccgcttcagaacaaggaagaagttgatatatttgccttgctgggttttacctctgatatgcagaaagtcagtgaaagagactttggggaacaaattggaagcacgtggcgcaggggcgctgcgccggagcgtaaggatttaagcataggaagctattttgaaacgagaaataaaaacacaatcaaaatgaagacggataaaagaaccggaaaattaaaagcagcgctttcttttatggagcggccgaacaaccgccaatgctccacggaagaatgccaagagatagcgcttcaatttttgtatgccctctatccgagagcggctgagtttttcagggtgaatcccgtccgaattgatgaaagagggagagtccgcaaccatttttctgtctggtataaaggagtgccgctgcggttcggcgctgcccgcatcattgtcaatccggaaactgggttgattgacgcttttatggcgcctgatattgaacctgaacaattggaagcgataaatcacaggccggatgtttccgctgaagaagcaagagaagcgtttttagccgcttttgatgtgaagctggaatggcagcctgattttacagcaggcagtgaccagcactacaaacttgtctataagccggtttacccttcatatattgatgcgcacataaggaaaaagaaaaggctgtgaggggtgtctagttaggaatcatctccaagtgggggtagtccttgaatcgtttccaatccccgccccattcaaaaccgagtgtcttagcgatctcgacaacctccagccaatctgattttccgttttgattgccgtcatattccatatcccatatgatgcttccatcctttttttgaagggcgaaatcaatcgctaaaccatagttatgatacgattcccctcctcttgcataggtgacaatattccctttttttgtacgtccctgtttatataattcatcttgttccttaaaggacctgaatccttcagtaatgacgacggtaatgcctttattcgctgcagcggctttgagtgcatcggcattctgcttcacaatcggatgaagatccgaggggacaggcatgtcctgcagggcgttttgagaatgccattcatgccgaatataactaaaacaaagatctagaagaaatagaatacataagataacaaatgtttttgcgggtaacttcatatcggtctcactttctcaagatgtgctgaatgtgaacgcttttaagtgattgactctctctaaaagcgaacagctatgataaaatataacataaatagtagcaggaggaaggaggcagaccgatgagagcaaagattccatcagaagaagtagcagtaaagctgaatgaatggtacaagctcattcgcgcatttgaagcagatcaagcagaagcgttaaagcaggagattgaatacgatttagaagatatggaagagaaccaggacttgcttttatatttttctttgatggaattccggcatcgaatcatgcttgataagctgatgccggtgaaagacagcgacaccaagcctccgttctctgatatgctgaacgaaattgaaagcaatcagcaaaaactcacgggcttattggaatactacttttattatttcagaggaatgtacgaattcaagcagaaaaatttcatattagcgatcgaccattataaacatgccgaggaaaagctcgagtatgtcgaggatgagatcgaaaaagctgagtttctttttaaagtcgcagaagtgtattatcacatcaaacaaacgtatttttccatgaattatgcgagccaggcgcttgatatctatacgaaatatgaactgtacggtcgccgccgggttcagtgtgaatttatcatcgccggaaatttgaccgatgtgtatcatcatgaaaaagcactgacccacttgtgcagcgctttagatcatgccaggcagcttgaagaagcatacatgatcgccgctgcctattataatgtcggacactgtaagtacagtctgggtgattacaaagaagcggagggctatttcaaaacagccgccgccatttttgaggagcacaactttcagcaagctgttcaagctgtattttcactgacccatatctactgtaaagagggaaaatacgacaaggcagtagaggcttatgaccgcgggataaagagcgcggctgaatgggaggatgacatgtacttgacgaaattccgcctcattcatgagctgtatcttggaagcggcgacctgaacgtgcttacagaatgctttgacctgctggaatccaggcagcttcttgctgacgccgaagatctgctgcatgatacagcggaacgtttcaatcagttggaacattacgagtccgccgctttcttttaccgcaggctgatgaatattaaaaagaagcttgccgagcagcgttttcaataggaaatggcagagaactacaggttctctgctttttttgtgctgttttcaactcggaaaaacagggtattttccactgcatagtgagaaacagaggaggatatcaagtatgtacaaagatttaaccggaaaaacagcgattgtgacagggtcttcaaaaggaatcgggaaagccattgcggaacggttcggacaggagagaatgaatgttgttgtaaactaccacagcgacccgtctggagccgatgaaaccctggaaatcattaaacagaacggagggaaagccgtcgcagttgaggcggacgtgtcaaaagaagaggggattcaggcgctcttggacacagctttagagcatttcggcacgctcgatgtgatggtaaacaactctggttttaacggcgttgaggcgatgccgcatgagatgagtcttgaagattggcagagagtgattgatgtcaatgttaccggaacctttctgggagcgaaagcagcacttaaccacatgatgaaaaacaatatcaagggcaatgtgctgaatatctcaagtgttcaccagcagattccgcgccctgtaaacgttcagtattccacatccaaaggcggcatcaagatgatgacggaaacgctggcgctcaattatgcggataagggaatccgcgtcaatgcgatagcgcccggcaccattgccacagaatcaaatgttgatacgaaaaaggaagagagcaggcaaaaacaattgaaaaaaatcccgatgaaagccttcggaaagcctgaagaagtggcggcagcagcagcttggctcgtatctgaggaagcaagctatgtgaccggcgcaacacttttcgtcgacggcggaatgacactttatccatctcagcttgaatagaacacaaaacagggggattgcgggatgaaaacggactggtggaaggatgcagtggtgtaccaaatttacccgagaagctttcaggacagcaatggagacggaattggggacttgcgggggattatttcccgtcttgactacataaaggagctcggggcagatgtgatttggatttgcccgatctatccttctccgaatgttgattacggctatgatgtgacaaaccataaggcgattatggattcttacggaacaatggacgattttcacgagctgctggaccaggtgcatcagcggggattaaagctggtgatggactttgtgttaaatcacacctcggtcgagcatccgtggtttaaagaagcggagctggacaaaaacagcaaataccgcagctattattattggcgtcccggcacaaagaacggcccgccgacggactggctctcaaactatggatgcccggtctggcaatacgaagagcacaccggagaatactatctccatatgaatgccgtcaaacaagctgatttaaactgggaaaatcccgaagttcgccaggcggtgtatgacatgatgaaattttggctcgataaaggggtcgacggtttgcgaattgatcagctccatctcatttctaagaaagaatatcttccttcgtatgaggactatatcaatcagcaggcagagccgaagccctttcagccaaatggcgaacaaatccatgactatttaaaagaaatgacagatgaagtgttttcccaatatgatgtcatgtctgtcggagaggttggcagtgtcacaccggaagaaggcctgaaatatacgggaacagataagcatgagctgaatatgatttttcactttcagcatatggagcttgatcagcagcccggaaaagaacattgggatttgaagccccttgagctttctgatttaaaatcggttttgacaaaatggcaaaagaagcttgaacatcaaggctggaatacattgttttggtgcaaccatgaccagccccggattgtgtccagattcggagacgatggggaataccgcaaaacatcagcgaaaatgctggcagccgtactttattttatgaagggcacgccgtatatttatcagggagaagaaatcgggatgacaaacgcgccgtttacccggattgaagactacaaagatatccaaacgatcaatatgtatcataaacgggtgtttgaaaaaggctatgatccaaatgatgtgatgagatcgatcttagccaaaagccgggatcacgcccggaccccgatgcagtggaacagcggcaaaaatgccggatttactgacggcacgccttggctgaaggtcaatccaaacttcaccgcaatcaatgtggaggaagcgcagggagatcctgattcggtcttaatctattacaaaaagctgatcagcctgagaaagcagtacgcggacctcatgaaagggagctttgatcttttgcttccggatgatccgcagttgtttgtatacatgagagaaaacagtaaacagcagcttttgtcggtcaataatttttcaaaagagcaggctgtttttcagtggcccaagaactgcggcaaagctcaggcctctctgcttctcagcaattataacaacgatgatcttgctgacgaaatggtgttccggccttatgagagcagggtctatcttctggacaaaacaaactaatgattgaagtagcccggcatttttagccgggttttttagtacatatattcgctctgcaggcgggaagaataaatgaaaatgaaatttattcttgcaaaacgtaatgacttcggtttattatgatataggattacaaaatcgttatcattttgatttaaagtttctgaaaaagaggggatatacgatatgtttaaaaaatggagcggtttgtttgtgattgcagcgtgctttttattggttgcagcatgcggcaactcatcaacaaaagggtcggcggattcaaagggtgataaactgcacgttgtcacaacgttctacccgatgtatgaattcacaaaacaaattgtaaaagacaaaggcgatgtggatctgttaatcccatcttccgttgaaccgcatgattgggaaccgacgccgaaagacattgccaacattcaggatgctgatttgttcgtttataatagtgaatacatggagacatgggttccgtcagctgaaaaaagcatgggccaaggccatgccgttttcgttaatgcaagcaaaggcattgatttaatggaaggctctgaagaagaacacgaagagcatgatcatggggagcatgagcacagtcatgcaatggaccctcacgtatggctcagccctgttctggcacagaaggaagttaaaaatattacggcgcaaatcgtgaagcaggacccggataacaaagaatactatgagaaaaatagtaaagaatatattgcaaaactgcaggatcttgataaactatatcgtacaaccgcaaaaaaagcggagaaaaaagaatttatcacgcagcatacagcttttggctatctggcaaaagaatacggcttgaagcaggttccgattgcagggctttcacctgaccaagaaccgagcgcagccagcttggcaaagctgaaaacatatgccaaagaacataatgtaaaagtcatttactttgaagaaattgcatcctcaaaggtcgcagatacgctcgccagtgaaatcggcgcgaagacagaagtgctgaatacactggaaggcttgagcaaagaagaacaggataaaggtttagggtatatcgacattatgaaacaaaacctcgatgccctgaaagattcactattggttaaatcataagatagtgtgcgccggagggtgcacactatttctttgtgagaaaggaagattaacatgaatctcgtctcattgaaagatatcgttttcggctattcccatacgcctgttttagataaagtatcacttgatattgaaagcggtgagttcgtcggcatcactgggccaaacggcgcctctaaatcgacgctcataaaggtaatgctcggcatgctgaaaccgtgggaaggcacagtgacgatcagtaaaaggaatacagaagggaaacgcctgaccatagggtacgtcccgcagcaaatttcttcatttaatgccggctttccgagcacggtgctggagcttgttcagtcaggccgctatacaaaagggaaatggtttaaacgtttaaatgaagaagatcatcttgaagtagaaaaagcactgaaaatggtggaaatgtgggagctccgtcaccgtaaaatcggtgatttatcaggcggacagaaacagaaaatctgtatcgccagaatgctcgccagcaacccggatctgctgatgctggacgaaccgacgacagctgttgattacgacagcagaaaaggattttacgaatttatgcatcaccttgtgaaaaatcacaaccgcacagttgtgatggttactcacgaacaaaacgaagtacagcaatttttagataaagtgattcgattagagagaggagaaaaaggcggatggaaatgtttgacttggaattcatgcgacgagcttttctagcaggcggcatgatcgccgtcatggctccgatactaggagtgtatctcgttctcagaagacaggccttaatggctgacacactttcacatatctcattgtcaggtgttgccatcggcttttttctcagcaccaatataaccgcagcaagcatagtcgtcgtgaccatcggggcgatcggaattgaatacatgcggcgggcgtatcggacttattcagaagtgtccattgccatcttaatggcagctggtttgtccttcgcgatgtttttaatcagcctttccaaaggcacagccaatatgagcatcgatcaatacctatttggatcgcttgtgacagtaaaccagcagcaggtctatattatcagtattatcacactgctgatcctgctttattttatcgtactgagaaggccgctctacctgctgacgtttgatgaagcaacagccaaaacatcgggaatcaatacaaacgttctctcgttgtcattcagtattgtcacaggccttgcgatttcagtcattattccgatcatcggggtccttcttgtatcggccctgctcgtattgccggcagcattcgccatcagaattgcaaaaggctttaacatggttttcattacagccatactcatttcattattcagcgtatttacgggactgacatcatcctatcagctcgggacgccgccaggtccgtctattaccctgctattgatcgttttgctattaatcggatttgcagttcagggagtttggacgtttatcaaaaaagaagctcagcgcaaaaaaaggcaccgataacatgaaaagcagttttccctagggaaaactgctttttttatagaaacaatccggcaaggcgctcataagattcttttttcgcctcaaaatcaaacacattgcacagaaccatgatttcatttgtttcgtagcggcctgtgaggtctaacagctgttgtttgacagtggttggagaaccgatcaccatccgctttctgttttcttctatgagttttttatcggacgctgtgtagggataggctttcgcctcctcgatgcttggcacgcggctgtccaagccttttccgacgcgaagaagccacaaatcctggcttaatgcgagttcttctgcctcttcatctgttttcgcgcaaatgacaaaaatcgtaaacagtgcggacggattcgaaaaatgggctgagggccgaaagctttcccggtagatgcggaatgcattttctcctcgctcgggattaatgaaatgcccaaatacatatccaatcccctgttgcgccgcgcgtcttgcgctgttttcaccaagaccgagcacccatagctcgggtgccgtgtcaataaggggcgccgctttgattccggcatacggatggtcgggaggaagggaatctgttagaaaataagagacatcctgcagctgtctgttaaattcggttaagctttttttcaccccgtccgttaatgcaagcctggtttttgtcgtgccgccgggggaacggccgacgccgaggtcaatccggtttggatacagggcctcaagctggcgaaaggtttcagccactttaaatgggctgtattggggcagaagcacgccgcctgatccgacacgaatggtgtttgtctgtgctgcgatgcgggcgatcatgatttcaggcgctgtgcttgccagtcctttcgtgctgtgatgctcggcaaaccaataacgcttatagccccactcttcactaaatcgagcaagctcaaccgaatgctgaagagttgtcacagggccctctcctttagaaacaggagcctgatcaagtatgcttaaatgaatcaaaaggccgcttcctttctgtctgtttttagatggtgacaccagaataggcaaaatgacttgcccgcgtcaaatggtttgtttaagaagcgcactttatagcatttgcaaatcatatatcaaatatggaagttttttttcgaggtttttcgtcaattattcttaacttttacgaaactttgatataataacaaacgtatatattagtaatttacggcttattttccttgtgagcgtaaaaataaatgtgactatcttcacattttgatgagtaggagtgaatcgtgtggcaatttctttagaaaaaggtcaacgaattgatttaacaaaaggaaaagccggtctgtcaaaattgatggtcggtctcggctgggacccagtgtcctcaggcggagggttcttcagcaaactgcttggcggaggcggtccgaatatcgactgtgacgcttcagtgctgatgttggaaaacggaaaattcaccgataagaaaaacctgatttatttcggcaacctgaaaagccgctgcggcggtgtacagcatacaggcgacaacctgacgggtgacggtgcgggcgatgacgagcaaattatgatagatttagataaagtgcctgcaaacatcgataagcttgtatttgtagtaaacatttacgattgtgtcagaagaaaacaagatttcggcatgattcaaaatgcgtttatccgcgtagttgatcaatctaatcacgaggaaatgctcaagtacaatttgagagacaattacgccggcagaacaagcctgattacagcagaaatctaccgcagcggcagtgagtggaagtttgcggcgatcggtgaaggcacgaacgatacgagattagaagatattatcagccgatacgtataaaagaaaaggagtggatgaaacatgacaatttcattggcaaaaggacaaaaagtagatttaacaaaaacaaatccgggtctttcaaaggttgttgtcggtttaggctgggatacgaacaagtatgacggcgggcacgactttgatcttgactcaagtgtgtttctgttagacgccgcaggcaaatgcgcgtcaccaaacgactttattttctacaaccagcttgaaggcggcaacggttcagtcgttcattcaggcgacaacctgactggtgctggcgaaggcgacgatgagaatgtaaaagtaaatctcagcgctgtaccggcaaacattgataaaatctcatttgttattaccattcacgatgcagaagcgcgcagccaaaactttggacaagtatcaaacgcgtttgtccgcatcgtaaatgaagaaacaaatgaagagctcatccgttacgatcttgcagaagatttctctattgaaacggcaatcattgcaggggagctttacagacataacggcgagtggaaattctcagcaatcggctcaggctaccaaggcggccttgcccgcattgcaacagactacggtttgcaagtcggttaagacaaatacgaagagcagaaaggagagaggcagtatggccattcaattatcaaaaggacagcgcattgatttaacaaaaacaaatccgggactgactaaagcggtgatcggcttaggctgggatacaaacaagtattccggcggacacgattttgacctggatgcttcggcctttttagttgatgcgcatgataactgcgtaaatgatctcgatttcgtcttctataataaccttgaacatccgagcggcggtgtcatccatacgggtgacaaccgcacgggtgagggcgacggagatgatgagcagattatcgttgatttctcgaaaatccctgctcacattgagaaaatcggcatcacagtgaccattcacgacgctgaagcacgcagccaaaactttggacaagtttccaatgcatttgtccgcgttgtggatgaagaaacgcagaatgagcttcttcgcttcgatttgggagaagacttctccattgaaacagctgttgtcgtttgtgagctttacagacacggcggcgagtggaaattcaatgcgatcggcagcggattttccggcgggctggctgcattgtgccggaattacggtttgcaagtgtaagcgagtgacaaatagagaagtcaccgtttcaaattaataggaggaaaaaacttggactttttacatcatattttgtctacgtatgcttcatttttcgattggaaaatgtggggggaagttctgactgatcctgtttcctggggtttgatcggttcccttgttgttctggaaggccttttatcggccgataacgcgcttgttcttgcggtcatggttaaacacctgccggaaaaacagcggaaaaaagcgttaacgtatggtttgtttggagcttatattttcaggtttattttcatcgggctcggtatgcttctcattaaattctggtggatcaaggtgcttggcgcgctttacctggcttggctcgtcattaagcacttctggattggcgaaaaagaagaggaagcggacggcatcaagaaaaactcttggatggtccgcacgttcgggatcttctgggcgactgtcatttcagtagaattaatggatcttgccttctctgtggacagcatcctagccgcgtttgcagtatctgaaaaagtatgggtgcttctgatcggcggtatgcttggtattttaatgatgcgtacagtggcaaaagtgttccttgtgctgattgataaaattcctgagctggaaaacacagcattcgtgttaatcggcattatcgcgctgaaaatggcggggagcgctttccattacgaaatgccgcactctgtattcttcattatcattatcgctgcatttgcggtaacattgatcattcactacatcaataaacaaaagcaggtgcgcgaacaaacagccgcttcaaaagaagaataaaacaaaacaaggagggaggttcaatgtccttccttttttgttaccgaaatatcgttcaatgacaaaccggaaaggaggatatgatgagacaagaagaactaaccattcataaagcacttccggctgatggcgattggaaaagcctgctgtttcagccattgccggagcgggatcactatgaaactgcacaaggcctttctttttctcgtcttgccggtcagatattgggcacgcctattgatgagacggactactataacgagctatatgagctgtctgtaaacgaccgcataacgattttgagtgaaacgcttgataaaacaatcgaaccggaaacatttcaaaagcttcagcatattcattccatcaatcagaaagaaaaagggctgtcagtcagccgctttgttgcctttctggacggggaaaagctgattgcgaagcactcaaatcccctgatgcaccgccatttaagaaaagcgctgatgacgcttttacatacctttgcggacagtcatgaaaaggggctgaatcatcctgattttcgcagagtgctgcttgatgtctcgaagttttccttaaaccatctgaacccttggctggaaaaaaccgatatagagcgggagatgccgaaggttgtttggtatggagatgcgacgaaaagccagctctatttcttatattatctgatgctggtcggctgtgatgtactgctgttccatccggcgggaacggatcagctggcgcttgtcgacccgaagcaggagctcggttttacggaaaagctcccggatgtttcggagcttcagccgttcccgaaagaaaaaccagaccggaaatcaacagtggcttaccgctcaacaaaggaaattgaacatgtgctgaatcacgaggaatccatgctgtataagccgtggcagttcagagatcacacaccggtgtccgttacgctgaaaacgacctatgatgaattgtttttaatcacgaaagaacgcgcctttattcggccgaatttcaaagctgataaacattcaattgagattccgaatgtattcgccaaaattatgggcgtgtcgaaagacaataaggaatattggaacaggcttcatactctagcggattatcaggaaacagaaatggtcagaagctttccatttacagaagaaataaagtcgaactatcaatttcactacagccacgcacttgatcaagaagggaacattgatccggacaagctgatggcaagcaatgtgtggcagtacaaacagctgccggcgggcgttcagactgccattgccaaaacgatttcgagaatgtgcaggcacccgcggcttaaagctttgcatcaggaacaagtcaaggatgttcaaatctatttgtttaaacaaacaacaaatctgcctgctaatctgctgaaattgattcaaatgttcgactatgcgcaaaccgttccgaaactcgttttatatcatacggaaatgagcggcggactcacgcgttcggatgctgctgccctgctgttcctgaatgaaattggaatcgatatcatcatttataatccgcccggacaccaagatattgagcagtttattgaagatgaccagtatgatatccactggctggatgacatggtgtttcagcaggactacaaagagccttcgcttgtgaaaaggctcttcagaaccattacccaaaaataaggagagaagaaaagcatgacaacagaaaatcaaaatccgcttgttctcgataaaaatgaagagatttcccagcaaaaagctgacgatatccgtcttcagcttcgtcaggaaccagaagtgaagcggcttgctcaacaaattgacgtcaaaaaccaaatggagctgcttgagtacggcaaggagccggccgttgaaatatccaagttctctgaccgcatcttagggatgatgaaaacaacaagcgtgacagactccggcacaatgctgactcagcttgggaaaatcatggaccgcttcgacaaaaatgattttgatgagccaaagggattaatggcgaaaattttcaaacgcggcggcagcatgattgaaaaaatctttaaaaagtatcagacgcttggcggagagattgaaaaaatccacgttgagatttcaaaatacaaagatgagatgacgaagacgaactacacgctcgatgaaatgtatgaaaacaatatcaaatactatatggagcttgaaaaatacgtcgttgccgggcagatgaaactggaagagatgcagtcgatccttccttcatatgaggaaaaagcggcaagcgggaaccagctggcgcaaatgcagctcgatacgttgcgcaacggcattcaggcgcttgaggaacgggtgtatgatctggatatggcacggatggtggcgcttcaaactgctcctcaaatccgtctcctgcagcgaggaaatgcaaagctgatcgggaaaatcaactccgcgtttatcattaccattccgattttcaaaaacggcattattcaggctgttacggtaaagcggcaaaagcttgtggctgattccatgagcgagcttgaccgccggacaaacgagatgctgaaacgaaatgctgaaaacatctcgagccaaagtgttgaaattgccagaatggccggcagaccgagcatagatattgaaacgatcgaatcgtcttggaacacgattgtcagcggcatgcaggaaacaaaacaaatcgaagaagaaaacaagcgcctccgcgaagacggcgcgagacgaattgcacagcttcaggataatattaaaaaagcagcattgcagcaataagaaaaaccccgcttgtggaacataagcggggtttttcaattacatcatttagttaatgacaatgtgtaaagacaggtgtaaacttaaacggtaatcattttgcatatcagaggtgttggcaatgggaaaacaacagcctatatcccagcgtaaactgctgggcgtcgccggtttggggtggctgtttgatgcaatggatgtcggaatattatcgtttattatcgccgcgctccatgtagagtggaatctgtcgcccgaggaaatgaaatggatcggaagcgtcaattccatcggcatggctgcgggtgcgtttttgtttggtttgcttgctgatcgaatcggccgcaaaaaagtgtttatcatcacccttttatgcttttccatcggaagcggcatttccgcttttgtgacgagcttatcggcatttctaatccttcgtttcgtgattggtatgggacttggcggcgagcttccagttgcttcaacactcgtttcggaagcggttgtgcctgaaaagcgaggcagagtgattgtgcttttggaaagcttttgggccgtgggctggctcgcagcggccttgatttcttactttgtgataccaagctttggctggcaggctgccctgctgttaactgcgctgactgctttttatgcgctgtacctgcggacgagtctgcctgattcgccgaaatatgaatcgctttctgccaaaaagaggtcggtgtgggagaatgtaaaaagcgtctgggcaagacagtatatacggccgaccgtgatgctgtcgatcgtttggttctgtgtggtgttttcttattacggcatgttcctatggctcccgagtgtcatgctgctgaaaggcttcagcatgattcaaagctttgaatatgtcctgctgatgacgcttgctcagctacctggctatttctctgccgcatggctgattgaaaaagcgggccggaagtggatactcgtcgtttacttgattggcacagcaggaagcgcctatttcttcggaacggcggattccttaagtcttctgcttacggctggaatgctgttatcgtttttcaatctcggtgcatggggcgtgctgtatgcttataccccggagcaatacccgactgcgattcgagcaacaggttcaggaacgacagcagcgtttggaagaatcggcggcatcttcgggcctttgcttgtcggaacgctcgcagcccgtcatatttcgttttcggtcatcttttcaatcttttgcattgcaatcttactcgcggttgcttgtattttgattatggggaaagaaacgaaacaaactgagctagaataggaaaagcacctcttgaatgaggtgctttcgcgtgtcgacaaaccctcgcattcgttgtcaggactgcgcttcggtgctcaatgcgaagtggatcaacggctaaattctcaggcgtcctgcctaaacgccgtcgtcatcacatcctgtgaatgtccgctcctatgctcgtccttcctagacttcaagggttttcaatcacgctgaaaaaatgacaaaattctaaaatgaaaaccattttagaattttgtcaacaatctgaggtacctctgaatgaggtgcttttttacaattgcgcccgggctgcggattggcgtttcccggttttactaattgtctggtagagcgtcatagaaagtatgaacagaatggcagtaaatcctgtgacagctccgaaatgctgtgtgctttgatataaaaaacctgcaatacttgtaccgacagtggttccggcatacatagcggcattggaaagggaagcaatggttcctcgcgcatttggtgcaatggattgaaagacacccatcattaacggaaagatgatgccagctgtaaagaacgtgagaaaaaagccggcttctactaaaaacaagtttggaaagaacggaagagcgaaatagagagcgcccattagcagcatcccgctgatcagtgttttaaacatgcccagcttttctgaaacccggctgccgataaggctcccgagcatatttcccagtccgagtacaagcatagctgcgccaatttgtgacacggttaaatgataatccgcggaaagccaagtacccagaaagctgaacgatgcgaagtttccggtttgaaacagaaaataggcaagcagaatgaccgatgttttcggcaatgaaaaaagctcccgataggggttgacaattgatgggcgcgccaatggttcagaaggccggatgccaggcatgaccgccgccaggatcaatagaagaataagcgagcacgctgacaaaacgaaaaatggcgtatgccatgtaaaggaagcgagaaaccctccaataggaagtccgagcatttgtgaagcggccaaacctgctgtcgcaatccccatgccttttatgatctgagaaggctggacaatgactgggatggacgcccaaatttgaggcgtcacaaacgcagcgctaacgcctgcggcaaaacggaacaggcacatggcggcaaaagagggagcgatgccgcataaaaacgtggatacaataaagcctgcaagtccccacagcatgactgttttcctgttcagccggtctgagattgggcctgcaatgaaagcgaagagcgcataaccgagtgcataagcactgaccatccagcctgacaaatcagtagagacatgaaactgatcctgtaaaagggggagaagcggcgaaagcaaaaaggtatccgtgccaatgacaaacatgacactgaagaaaagccaaatgcgattcaaatttatcactcctattgttttataactttgaaactatgaaacagatatgtatagagaaaaccctttgttagagggtttccaaaaagccaggcaggtatgtttgaaatgtgtcttcacgcagactgacgtattttgtccgcgaatctttccgggttgccgtcaatcccgcttcacgcagcgttttaaaatgataagatgccgtggttttgacaatattgcacttttcacctacttcaccgcagctgagttcttttccgctgacataaagcgtacgaataatggcaagccttgattcatcagacagtgctttaaaaatttgcgctctgatttgatcatctgattgtttcatagtcatgaaactataatacataatgggtgttgaaaaagcaacttatttttccagtaaaggagcaggaagtcataagaggaaggaggaattcaattccaataaaagcgttttcaactaaagataggcgaaaaatcacccgtaaaatacaatcatataggaggattacagagcatttagaagcataaataagatcatgtggtcacatggatgtttataaagaaatggtacagaataaaagagaatatgctgtttgtgtaggaagttacataaatgttacggtaataaagattgcttaatatggagggaaaatatgagtgtagatgagaaaccaattaagataaaagtcgagaaagtctctaagatttttgggaaacaaacaaagaaggcagttcaaatgcttgccaacggaaagacaaaaaaagagatcctgaaagcaaccggatcaaccgttggggttaatcaggcagattttgaagtatatgatggtgagatatttgtcatcatgggtctatcagggagcggtaaatcaactttagtacggatgttaaaccggcttattgaaccgactgccggaagtatttacattgatggtgacatgataacaaatatgtcaaaagaccagctccgggaagtccgccggaagaaaatcagcatggtcttccaaaagttcgctctgttcccgcacagaacgatacttgaaaacacagaatacggactggagcttcaaggtgtagacaaacaagagcggcagcaaaaagcgcttgagtctcttaagctcgttggactggaaggatttgaacaccaatatcccgaccagctttccggcgggatgcagcagcgtgtcggccttgcccgcgcgttgacaaatgatccggacatccttctgatggacgaagcgttcagtgcgcttgatccactgattcgtaaagatatgcaggatgagcttcttgatcttcacgataatgtcggaaaaacaattatctttattacgcatgacttggacgaagcgttgcggatcggcgacagaattgtcctaatgaaggacggcaacatcgttcaaatcggcacgcctgaagaaatcctgatgaatccatctaacgaatatgttgagaaattcgtcgaagatgttgatttgtctaaagtcctcacagcaggccacattatgaaacgcgctgaaacagtgcggattgataaagggcctcgcgtagcattgacactgatgaaaaaccttggaatttcttcaatttatgcagtggataaacaaaagaaattattaggtgttatctatgcgtctgatgctaaaaaagcggctgagtctgatttgtcacttcaagacatcttgaatacagaatttacaactgtaccagagaatacgtatctgactgagatttttgacgttgtgtccgatgcgaatattccaattgcggttgtggatgagaagcaaagaatgaaaggaattgtcgtaagaggcgcgctgattggcgcacttgccggcaataacgagtatatcaatgctgaaggcactaacgaacaaacacaagatccttctgcacaggaggtgaaataagatggatagactgcctagaatacctttagcagatattattgaccgttttgttgactggattacgatgacgtttggcggattcttcgacggaatcgctaacggattggccgcttttgtaaatggaattgtcaccggtcttggatttattccatctattttgttaacgattattttcgccgcacttgcgtggtggatcagtacaaggggaattgcgttatttacgttgattggattcctcctgatcgattatttaggatattgggacccaatgctgcaaacattggcgcttgttttgacatctgtgattatttcgattgtggtcggggttccgatcggaatttgggcgtctcagaaagaaacggttcgccgtattgtaacgccaattcttgatttaatgcagacaatgcctgctttcgtatatctattgccggcgattttcttctttaacatcggtgttgtgccgggtgttgttgcatctgttatcttcgcgatgccgccgacaatccgcatgactgttctcggtattaaacaagtgccggcggatttgattgaagcgactgaggcattcggttctacaacagttcagcgtttgtttaaagttcagcttccgcttgcgacaaaaacgattttggccgggatcaaccagagcatcatgcttgcattatcaatggttgttatcgccgcaatggtcggtgcaccgggacttggttctgaagtatacagtgccgttacacagctgaaaaccggggtcggagtagaggccggtatcgccatcgttatcgttgccattaccctggaccgtattactcaaaatattaaagtgaagaagaaaagcagggggaatgcctgatgcttaaaaaaatcatcggcatcggcgtttccgccatgctggcgctctcacttgcggcttgcgattcagaaaacgatgaaaatgcatccgcagcagaacaggtgaataagaccatcatcgggattgaccccggttcagggattatgtccctgactgacaaagcgatgaaggattatgacctgaatgactggacattgatttcagcgtcaagtgctgcgatgaccgctacgcttaaaaagtcatacgaccgtaagaaaccgattatcattacaggatggactccgcactggatgttctccagatataagctgaaatatctcgatgatccgaaacaatcttatggcagcgcagaggaaatccatacgatcacacgcaaaggcttcagcaaagagcagccgaatgccgcaaagcttctgagccagtttaaatggacgcaagacgaaatgggcgaaatcatgatcaaggtggaagaaggcgagaaacctgccaaagttgctgctgagtacgtcaataaacacaaggatcagattgccgaatggacaaaaggcgttcaaaaggtgaagggagacaaaatcaaccttgcctatgtggcgtgggacagtgagattgcaagtacaaacgtcataggcaaagtcttagaagacttgggctatgaggtaacacttactcaggtagaggctgggccgatgtggactgcaattgcgacgggaagtgcggatgcatcactttccgcatggctgccgaatacccataaagcatacgccgctaaatataaaggcaaatatgacgatattggcaccagtatgactggtgtgaagatggggcttgttgttcctcaatatatgaaaaatgtcaactcaattgaagatttgaagaagtaatcaaaaaagcagcctgtgtcaggctgctttttttgcgttattttacgtaagcggcagcgggtgaatcagccttttgaaaagtttttaatacggcattcgctaaaatatgaatgccggtaaacatcgcgtttcggtcaaaggtcatgtgcggatgatggagccccggctggagcccgcagcctagtccgagcatcgttgttttcagattcggcaccttcacggcgtaaaaatggaaatcctctccgccggtagtgacaagcgggtcatcaagccgctcagccccgatgatatctgtaatggcttctgccatgatcgcttcagcttctttgttttgtgttgccgcaggaaggctgtgttctttttgcagctcgatttttgcgccgaatgcagcggcggccgcttcacaggctctttctgtctcggcgattaacgcctccatggcttcattggtctgtgcgcgcaaatcaaggctgaacgatgcttttcctggaatgatgttagagctttcaccgccggcttgaagttttgtcattttgacggtatgcgggatttgcgggtcaatatgaatgagtccgagcttatgtacaagaaatgccgcaatttcaatgctgttttttccgagatgcggacgggcgccatgagcctcttccccgatgatcgttccctcaatgtgctggcttgatccgtgcagaatagacggagcgcagcggccgttctgtgtttcctgaatcgggcggacgtgaacgccatacaaatagtcgatatcatcaagcacgccttcttctatcattttcaaggcgccgccgcctttttcttctgccggctgaaagataaaacggattgtgcccttcggaagctcaggttgtttttttagcagcattaatgtgcccaatgccattgtcatatgtgaatcgtgtccgcaggaatggttggcgcgaaatgtgccgttaacctcctgccacagcgcgtcaatatcagcgcgtaccgctacaacaggtgagcctgagccgatttcgccgacaaccccggtgcagtctgaaaacgtgcgcgtccggcaccctaaatcctcaagcttttgtttcaaaaatgaagttgtctcatattccttccagctgacttcagggttcgcgtgcagatgctcgaagatgtccataatggtttgtttcatgtcttctgaaagcttttgcatggtaagaaatacctccttctatcagaatgaatttttaccttctttactttatttatattgaaacaggaagataggctgtatataatatagcacatattgctactattcagaataattaatattttcaaacagaggggatggatcgaaatatgagtatgccagcagccgaaacacagcctaagaaaaaacgaatgacatttaaaatgcctgacgcttatgtcctcttatttatgattgctttcatttgcgcaatcgcttcatatattgtgccggcaggtgaatttgaccgcgtgacaaagggggatgtcacgaccgctgttccgggaagctatcattccattgaacagtctccggtcagcttgatcagcttttttacttctctacaggatggaatggttggatcagcacccatcatctttctgattctattcacaggcggcaccattgctattctagaaaaaacgggtgccatcaatggcctgatttacaatgtcatcagcaaattccgcacaaagcaattattatttatttgtattgtcggcgcattgttctccattctcggaacaaccgggattgtcgtgaattcagttatcggttttatccccatcggcctcattgtggcacgatccttaaaatgggacgcagtcgcgggagccgctgttatatacatcggctgctacgctggatttaactccaccatattatcaccgtcaccgctcggtttatcacaatcaatcgcggagctccctcttttctcaggaatcggcctgcgagttgtgatatacatatgctttttgctgtcttctattatttatatctatttgtatacgagaaaattaaaaaaatcaaaagatgccagtgtgttaggaacagattggttccctgcggcaggaatgggcgaagccggtaaagaagaagatcagtcagtgccgtttaccgttcgccataagctgattttggctgtggcgggactctcacttgtcggatttttatacggcgctttgaagcttggctggtcagattcccaaatggctgcgacatttatttttatttctgtccttgccggtttaataggcgggcttgcggcgaacgatattgccaaaaccttcattacgggctgccaaagtcttgtatacggggcgctgattgtcgggatggcacgaagcatttccgttatccttgaaaatggaaagcttctcgatactgtcgtcaatgctttggcttcacttttggatggattcagcccgattgccggggcaatcggcatgtatatcgccagtgcgctgcttcattttctcatctcttcaggttctggcgaagccgttgtatttattccaatactggcgccgctcgctgatttgatgggaatcacgagacaggttgcggtggaggcagttatgcttggagaaggggtcgtcaactgtgtgaacccgacatccggcgttctcatggcggtgcttgccgccagcggtattccgtatgtcaagtggctgcggtttatggtgccgcttgctctgatttggttcttgatcgggcttgtctttatcgtgatcggcgtcatgatcaattgggggccgttttaacgattgctgcccgccggcttgtacggcgggcttttgagttattcattgcagaagcgcaggctgttattgtaacatgtaagccataagccattcgtaaaagtgcgggaggaaggtcatgaataatctgcgtaatagactttcaggcgtgaatgggaaaaataagagagtaaaagaaaaagaacaaaaaatctggtcggagattgggatgatagcgggagcatttgcgctgcttgatgtgatcatccgcggcattatgtttgaatttccgtttaaagaatgggctgcaagccttgtgtttttgttcatcattatcttatattactgcatcagggctgcggcatctggaatgctcatgccgagaatagacaccaaagaagaactgcaaaaacgggtgaagcagcagcgaatagaatcaattgcggtcgcctttgcggtagtggtgcttacgatgtacgacagggggattccccatacattcttcgcttggctgaaaatgattcttctttttatcgtctgcggcggcgttctgtttctgcttcggtatgtgattgtgaagctggcttacagaagagcggtaaaagaagaaataaaaaagaaatcatcttgaaaaatagatggtttctttttttgtttggaaagcgagggaagcgttcacagtttcgggcagctttttttataggaacattgatttgtattcactctgccaagttgttttgatagagtgattgtgataatttaaaatgtaagcgttaacaaaattctccagtcttcacatcaggttgaaaggaggaagcggaagaatgaagtaagagggatttttgactccgaagtaagtcttcaaaaaatcaaataaggagtgtcaagaatgtttgcaaaacgattcaaaacctctttactgccgttattcgctggatttttattgctgtttcatttggttctggcaggaccggcggctgcgagtgcagaaacggcgaacaaatcgaatgagctaacagcaccgtcgatcaaaagcggaaccattcttcatgcatggaattggtcgttcaatacgttaaaacataatatgaaggatattcatgatgcaggatatacagccattcagacatctccgattaaccaagtaaaggaagggaaccaaggaaataaaagcatgtcgaactggtactggctctatcagccgacatcgtaccaaattggcaaccgttacttaggaactgaacaagaatttaaagaaatgtgtgcagccgctgaagaatatggcataaaggtcattgttgacgcggtcatcaatcataccaccagtgattatgccgcgatttccaatgaggttaagagtattccaaactggacacatggaaacacacaaattaaaaactggtctgatcgatgggatgtcacgcagaattcattgctcgggctgtatgactggaatacacaaaatacacaagtacagtcctatctgaaacggttcttagaaagggctttgaatgacggggcagacggttttcgatttgatgccgccaaacatatagagcttccggatgatgggagttacggcagtcaattttggccgaatatcacaaatacatctgcagagttccaatacggagaaatcctgcaggatagtgcctccagagatgctgcatatgcgaattatatggatgtgacagcgtctaactatgggcattccataaggtccgctttaaagaatcgcaatctgggcgtgtcgaatatctcccactatgcatctgatgtgtctgcggacaagctagtgacatgggtagagtcgcatgatacgtatgccaatgatgatgaagagtcgacatggatgagcgatgatgatatccgtttaggctgggcggtgatagcttctcgttcaggcagtacgcctcttttcttttccagacctgagggaggcggaaatggtgtgagattcccggggaaaagccaaataggtgatcgcgggagtgctttatttgaagatcaggctatcacagcggtcaatagatttcacaatgtgatggctggacagcctgaggagctctcgaatccaaatggaaacaaccagatatttatgaatcagcgcggctcacatggcgttgtgctggcaaatgcaggttcatcctctgtttctatcaatacgccaacaaaattgcctgatggcagatatgacaataaagctggggcaggttcatttcaagtgaatgatggtaaactgacaggcacgatcaatgccaggtctgtggctgtgctttatcctgatgatattgcaaaagcgcctcatgttttccttgagaattacaaaacaggtgtaacacattctttcaatgatcaactgacgattaccttgcgtgcagatgcgaatacaacaaaagccgtttatcaaatcaataatggaccagagacagcgtttaaggatggagatcaattcacaatcggaaaaggagatccatttggcaaaacatacaccatcatgttaaaaggaacgaacagtgatggtgtaacgaggaccgaggaatacagctttgttaaaagagatccagcttcggccaaaaccatcggctatcaaaatccgaatcattggagccaggtaaatgcttatatctataaacatgatgggggcggggcaattgaattgaccggatcttggcctggaaaaccaatgactaaaaatgcagacggaatttacacgctgacgctacctgcggatacggatacaaccaacgccaaagtgatttttaataatggcagcgcccaagtgcctggccagaatcagcctggctttgattacgtgcaaaatggtttatataatgacgcgggcttaagcggttctcttcctcattgagggcaatgctagaggggacttaccgaaagaaaccatcatagatggtttcttttttgttcataaatcagacaaaacttttctcttgcaaaagtttgtgaagtgttgcacaatataaatgtgaaatacttcacaaacaaaaagacatcaaagagaaacataccctggaaggatgattaatgatgaacaaacatgtaaataaagtagctttaatcggagcgggttttgttggaagcagttatgcatttgcgttaattaaccaagggatcacagatgagcttgtggtcattgatgtaaataaagaaaaagcaatgggcgatgtgatggatttaaaccacggaaaggcgtttgcgccacaaccggtcaaaacatcttacggaacatatgaagactgcaaggatgctgatattgtctgcatttgcgccggagcaaaccaaaaacctggtgagacacgccttgaattagtagaaaagaacttgaagattttcaaaggcatcgttagtgaagtcatggcgagcggatttgacggtattttcttaatcgcgacaaatccggttgatatcctgacttacgcaacatggaaattcagcggcctgccaaaagagcgggtgatcggaagcggcacaacactagattctgcgagattccgtttcatgctgagcgaatactttggcgcagcgcctcaaaacgtgcacgcgcatattatcggagagcacggcgacacagagcttcctgtttggagccacgcgaatgtcggcggtgtgccggtcagtgaactcgttgagaaaaacgatgcgtacaaacaagaggagctggaccaaattgtagatgatgtgaaaaacgcagcttaccatatcattgagaaaaaaggcgcgacttattatggggttgcgatgagtcttgctcgcattacaaaagccattcttcataatgaaaacagcatattaactgtcagcacatatttggacgggcaatacggtgcagatgacgtgtacatcggtgtgccggctgtcgtgaaccgcggagggatcgcaggtatcactgagctgaacttaaatgagaaagaaaaagaacagttccttcacagcgccggcgtccttaaaaacattttaaaacctcattttgcagaacaaaaagtcaactaaccgcaactttagagtaaagggctgattgtcaatgtgggagcagttgtatgatccgtttggaaacgagtatgtgagcgcacttgtggcgctcactccgattctcttttttcttttggctttaactgttttgaaaatgaaaggcattcttgcggcatttcttaccctagccgtcagtttcttcgtctccgttttggcatttcatatgccggttgaaaaagcgatttcttctgttttgttaggaatcgggagtgggctgtggcctattggctacatcgtcctgatggcggtgtggctgtataaaatcgcagtgaaaaccgggaaatttaccattattcggtccagcattgccggcatttcgcctgaccaacgattacagctattattaattggtttttgttttaacgcgtttttagaaggcgcggccggttttggtgttccgattgcgattagtgcggcgctgctcgtcgaacttggttttaaaccgttaaaagcggcagcgctctgcttgattgcaaacgcagcctccggagcctttggggcgatcggaattcctgtcatcacaggggcgcagattggtgatttgtctgctcttgagctgtcacggacattaatgtggacactgccgatgatctcatttttaataccattcctgcttgtattcttattagaccgaatgaaaggaatcaaacagacatggcccgctcttctggttgtgagcggtgggtatacagcggttcagacactgacaatggcggtgctcgggccggaattagcaaacattttggctgccttattcagcatgggcgggcttgccctcttcctccgcaaatggcagccgaaagagatttaccgcgaggaaggggccggcgatgctggtgagaaaaaggcataccgtgccgctgacattgcgaaagcgtggtctcctttctacattttaactgcggcgatcaccatctggagccttcctgccttcaaagcgcttttccaagaaggcgggctgttatatcaatcaacgctcctgttcaaaatgccttttctgcatcagcaaattatgaaaatgccgccgattgcgccatctgccatgccgttagatgcagtctttaaagttgatctgctgtcagcgactggtacagcgattttagcggcggtcatcgtgacagggctgttcagcaaaaagttctcctcccgggatgcctttgcttccctgaaggagacaggaaaagagctgtgggtgccgattatgacgatctgcttcgtgatggggtttgccaatctggccaacttcgcagggctcagctcttcaattggattagcattggcgaaaacaggagacctgttcccgtttgtcagtcctgttcttggctggattggcgtgttcattactggttctgttgtcagcaataatgctttgttcggtcatttgcaggttgtcaccggagcgcagatcggtgcgggttcagacttgctgttagccgcaaatacggcgggcggtgtcatggcgaaacttgtttctcctcaatctatcgccatcgctgccgcagcggtcggccaaacaggcaaggaatctaaactgtttaaaaagacagtggcgtacagcctgattctgttagtgattatttgtatatggacgtttattcttgcaagatttggagtgtaatagaaaagagcagtacatgcccagcatgtactgcttttttatgttaatttgctttctttgtcatttcggctgttgttttcactctggctttccccataaataaaatggtaaccgccgcgaggacaattggaatcaaagcgagcaaaaacacatacgtaatacttgatgacatcgcgtcaataatgcgattcaggatcgcatcaggaatctgggaacgtgttccagcttggaatatctcctgcgggtcgccaatattttgcgcagcacctgatcccgctgagcctttcatcccgctgaaggcgtcggtcagcttgttcgtgaatacgtttgtttgcaccgttccgaaaatggtgacgcctaaggtcatgccaaatgatcgcaaaaatgaatttgtagagtttgccgttccccgaaagcgaggttcaagatcattcatcgatgccgccggcagcagggagaagttaaagcctacaccaaagcctgaaatcatcataaagactgtcagccatacccgtgctgtgtcaggcgtcatattggaaagaagcagcatgccgataaagaaagctataacagatatcagcatcaaattgcggaagcttgccttcgtttggaagatcccgccgatcatgcttccgatgactgatccaatcatcatcggcgtcagaatgaagcccgcgcttgtcgccgagctgccgtagaccgcctgaacgaaaatcggaataaataccgctaaaataataaatgttccgccatacaggaaagcgagaatctgtgctgtggcaaacaagcggttcttaaacatccagaaagaaataatcggctcttctgcttttctctccacaataaaaaaggcaatgaagaaaacggcgaatacaataaacagcccgatgatctgaatggaattccaatcgtatgttttgccgccaagctcaagggcgaacatcaggcatacaatggatacgactaaggtaatcgcgccgccccagtctattttctgctttctgtgctccagagattctttgtagtagcgaataatgaaaaacaatgacaatgcgccgatcggcacattgatgtaaaacacccagtgccagctgatcgaatctgtaatgatcgcgcctaagagcggaccaagaacactggataatccaaatacagcaccgaacatgccggacatttttccgcgtttttccggcggaaacaaatcaaagataatggtaaaggcaatcggcaggagcgcgccgcctccgatcccttgaatggcccggaagatgatcagctgattcatcgtctgggcaatcccgcataaagcagaaccgattaagaaaaaaataagtccaaacaggaaaaaacgttttcggccgtacatatcggaaagcttgccgtaaatcggcatgccagccataaccgccaccatataggatgccgtcacccatgcaaatttatcgaaacttccaagatcggctacgatattgcccatcgcggtggcaacaatcgtattgtccattgcagacatcaagatgcccagcaggagaccgaggaccacaaatttggtggaagcctgttttgctgttgttgtgtccatttgttctacctcctcttacttttctatgtaagttctgatatcatgataatagtttgattgttgaatatctcgattatcaagataaactcgattttatagggaggactgtcagttgtcaacaagaaattccagaagtgagttggaaaagactgctgttcagctttttcgaaaactgggcacaagaacggttctgtttcatcaggcagccgctcaagctctcggtctgtttcccaccgatttgaaatcagctgacattttaaatgaagcagggccgatgacggccggagaactgggaaaaaaaaccggcctcagcacggggtcagtcacggcgcttgttgaccggctggaaaaagcggggtatgtggctcgtgaaaaggacccgaatgatcgcaggagagtcgtaatcgtccctttgactgcttcgaaaaaacatataaaggatttgttccgtcctctgtctgagtcaacgatggatttgtgccgcgaatatacggaagaggagctggaactcattttcagttttgtaggcaaagccgccgatattatggaggaagagcttgaacgtctgaaacagtaagtgaatttgtgcatagcttggcccgttcccgaataaattgtacaagttacataagagaagggagtacgggccggtgaacatttttttgagctatattgtgctgggactgtccttgtctgcgcctgtggggccagtgaatgcggcgcaaatagacaaaggaattaaaaacggtttttggcatgcatggattttcggtttaggcgccatgacagcggatgggctgtacatgctttttatctatttcgggctgtcacagtttttgaccgctccatttgtgaaaacgtttttgtggctcttcggcttttttgtcctgacctataccggaattgaaacgcttaaaaacgtcagagaaccgatggatgtgcgaagctcgcgggggaaaccgtcatacaggaaaacattcgcatcgggttttctcatttcattgtcaaacccattgagcatccttttttggcttggaatttacggaagcattcttgcgaaaacagcagaggcctacaatatgaatcagcttctaatctatagctccggcatcatgatcggcattttaatctgggatttctgcatggctatcacagccagtacgttcagaaacctgcttcatgaaaagctattgagaggattgaccggaatcgccggtgtatccctccttgtgtttggcttttactttggttatcagggcatcaaacagttattgggctgattcatgaaggacagtcacctgccgcttccagttttaatatagtatccagatgatactggaggtggatcaatggtgaatgggatttacaccaaaagttttctggaacgtattcaggaagagcttcctgaatggcaaagaatcgcttttgagctgctggcagaaactctgggggacgacgcggatacgtttccgtgcattcccggacgccaggcgtttctgactgatcagcttcggattgcttttgccggagatccgcgggaaaaccgcacagcggaggaactggctccgttgcttgcggagtacggcaagatatcgcgggacacgggaaaatacgcatccctcgttgtgttgtttgatacaccggaagatttggcggagcattattcgattgaagcgtatgaagagctgttttggcgctttttaaatagactgagtcatcaagacgaaaaagaatggccggaagacattccggccgatcccgagcattataaatgggagttttgttttgacggcgagccgtactttcttctctgcgctacaccggcgcacgaggcgagaaaaagccgaagctttcctttttttatgatcacgtttcagccaaggtgggtgtttgaggacctaaatggatcaactgcatttggccgtaacatgagcaggctgatccgatctcgtttagaggcctatgatcaggctccgattcacccgcaattaggctggtacggaggaaaagataatcgtgaatggaagcagtatttcctccgtgatgacgaaaaacaggtatcgaagtgcccgttttcttatttaaagaacatgttcaacaaaatgaaataaatcaaggactggcagggcgatctttatgaccctgctttttttgatagatcatggtaacgatggcgatgatcacgagaaaacctatgctgacgaaaaaaccgggccggcttgatttttcaaacaatgtaccggacacagccgcagcaatcagaaccatcgctaaataaatttgcgtttttcccatgccctcgggatcagtcagctttttgctggagaacaggataaacagccaagtgtataaaagcataagccccgcagctgttgtcatatgctcataaatgtttttaggcagcactaacgacagaataatggagagaacaagccccgcaaacgtcagcccaagtgccggccagcatatttttttgccttcctttagagtaaagcatttcggcgcgtcgccgtcatcagccatcgtacaaagcaatgtcgtaaccgcaaatagcgaagcgacaagggtcgagaacccggcgataatgaaaatcccgttaaatatatcaaggatgatctcaaggttgtatccttttaacgacgtaatgaacgggctgtcctgttctgtaaacttgtgtaacggaaccaaaagcagagccagcccgattgaaatgatataaataatcgccagcgttgccagcatcagtttccctgatttagacgcttcctcaggtttttttaagtgaaccgccatcagccccatgacctcaatcccgccaaaagcgtaaaacgcgtagattaaacctgtccacagccccatggcgccgtatgggaaaaactcactcgtcttatttggaacatgtatgccatgatttccgccggacaggataccgcataaagccaggatggcaatgacaataaacataaaaatagcagctgttttaatgactgccagcacgttttctgttttttcaaagacggacaggccggtgaaaataataaggagccccagtactgcatagattgaggcaaacacccatagcggcacttgaggaaaccaatgcttcgtaaatagcgaaatggctgtcagctggcttccggtaatcagcatttctgatgtccagtacacccagccgttgctgaagcctgcccatttgccgaatgcttttcgggcatacgcacaaaacgagcctttttccggctgcttcgccgatagcttggcgagctgttcaaagacaaaatacgtaccgatccctgcgatcagaaatgaaaggagaacggaaaaaccgctttttacaattgcgatgctggaaccgagaaagaagcctgttccaatcgtgcagccgactccgatcagtgacagctgccaccaagccagattcccttttggctggtctttttttgtttggctcattatttattcaaccccttttatctaaggttagattgtgatctgtccaaagcttatatacatcggatttttgcctctttttacatggagaaggaagcggacgctcatactaatgaaaaaaggagcaaaccaatgacacagcaatatattgtggagccgaaaaaagggcttgggctgaagctgaaaaagggtcagattttaaaggtggttgatgtagaagggcagcaggtggctgattttgtcgcataccatgccaaggatttttatgaacaccttgatcagggagcgacgatagacgccaatcactccattcatgtgaaggtcaacgaccatctctactccaacctgtataagccgatgttaaccctgattgaagatacggtcggcaagcatgatctgctgttgcccgcctgccgtcctgatatgaacaggctcttatatgggaagcaaaaggatgagtttcaggatacgtgctatgacaatatgaaccgtgcgcttgagcagtttggcgtaccgaagcctcacatgcattacccatttgcgatttttatgaatactgtccttgatgagaaagggaatctgtctgtggaaacgccgctttcgaatgccggagattatgtaaggctcagggcggagatggatttaattgtcgcgttttcttcctgcccgattgaaaaagggaaatgcaatggcgacagtgtgacatccatacgggttgaagtcagctgatctctcttgttcactgtgaatgaagacctgtgctatatttaatagggatacataacagtcatgattcattttcattgatttggggaaatgatcagtaacaagggaaaatgtacaggaggaatgattgggatgagcatgcaggaaaagattatgcgtgagttacatgtgaagccctcaattgatccaaagcaagaaattgaggaccgagtcaattttttaaaacaatatgtaaagaaaaccggtgctaaaggctttgtattgggaatcagcggcggccaggattcaacacttgcgggaagactcgctcagcttgcggtggagagcattcgcgaggagggcggagacgctcaatttatcgctgtccgtcttccgcatggcacacagcaggatgaagacgatgcccagcttgctttgaagtttattaagccggataaatcatggaagtttgatattaaatcgacagtcagcgctttttctgatcagtatcagcaggaaacaggcgatcagctgactgactttaataaaggaaacgtaaaagcaagaacaagaatgatcgcgcaatacgcgatcggcggccaggaaggccttcttgtgttaggaacagaccatgctgctgaagcagtgactggtttctttacgaagtacggtgacggcggagcagacctcctgccgctgacaggcttgacgaagcgccagggaagaaccttgctgaaagagctgggtgcaccggaacgcttatacttaaaagaaccgactgccgatctgctcgacgaaaaaccgcagcagtcggatgaaacagagcttggcatttcctacgacgagattgacgattatctcgaaggaaaagaagtatcagcgaaagtatcagaagcgctggaaaaacgctacagcatgactgaacataaacgccaggttccggcgtctatgtttgatgactggtggaaataagttgaagaaagcccgctctcggagcgggcttttgtcgtgtacagaagctttatttgatgcggatatgattcagcttgaccattaatctgtcggcgaaccttcggaggctgcctctcgtatcaggatctaatgggagttcggctctcgcggcaatgttctctgccacatcctgaatcgacaggttgtctgtttgaatgtggtcctcaaaaatgggtgatgataaaccttcaatgcagcggtcaatttgtttggcggcccaggagttttttccttctgctctggtgcgcagcctttttaacaaggtttcctttgaagccattagtgtaaagtggtgaacgatcctgccttcatgcctgagcctgccgatgatctcattgaagtattcaggatgtacaatcgtcataggcacaataatgatgccgcggtatgtatctgtcagagaagctagaaaactgtaattgaacgcccgccataagggatagctttgaaaatcgtcctttgcgatctcctgcggcaccatggagcgcagcgcaaaacccattttctcgggatcatacacgtaagatgggtttagccttctgtgcagttcgaaggctgtttgtgtttttccggaaccgaatgccccgtttatccaaatgatcatcgccatttctcccttcctattcatcatacagaaaaagacccttcaatcgaagagtcagctggaaaaacaataaaggcggaaggttttaacgcttttttgcgtcgaagtattaaaatacctgcagaaatgttgtacaatgaatgtcattcaggcaaaaatggctaaacaacaaagcgcactttaagcttggaccggtaaagccggtatctatataaatattcgttaaataagcatataatgaagataaaatttcattccttaggaggatttcgccgaagatgaacgctaaacgagccatcccagtaagagaaagaaatatcgtcctgatcggattcatgggtgtaggaaaaacaacaatcggccaattggtcgctaaaaaattatatagagattttattgatattgaccaagagatcgaaaaggatttcaatatgacaattcctgagatatttgagaaaaagggagaagactttttccggaaaacggagaaggaatatattttagacatctgccatcataaacgattcaaagtcgtatctctgggcgggggatcttttaaacaagaagaaatcaggaattgctgtctggaaaactgtctcgtgcttcatctggacctgtcatgggagaactggaagcagcgcgcggatttattgatcgaaagccgccctgtactgcataaccgttcaatggatgaaatggaacagctgtttaacgaaagaaaagtcatttatgacaagcacaattcaaaagtggcaacagacaacctttccccggaagaggttgccgattacattgttgagacattaaaaattggctgggatctttatcagccgatgtaaaaagccgtgcgcagcgcacggctttttttatcgttttatcccttgtatcaaaatcgcttttaaacaaaaggagatgggctgtccgttttggttcaatgtaatacagaacgtgtcgcgtgcttcgtctgatgcgtgattcaagtgggtaatgatttgtttttctcggtcagcgggggttccgcctcgtttgatccagctatcgtattgaatcggcaagttccacttttggatgtcttgataggccagttgattggcgctgaacatcgactgccattctgataatgagctttctcgaacatgggaagggtctcgaagccggttcaaatgattgacaaactcatcaagaatgggatcttcaggcgcgtaatgatcaactaagagaaaacgtccgtcctcttttagtacgcgtgcaacctcgctgacagctttgcggacatctgaaaaatggtgggctgcgtatcggcaggtgatgatgtcaaatgaatcgtcggggaaggggagtgactctgccgttccttgctgaaagcgtacgttttcagctcctttttcttgcgcgaaggaggacgcaacctcaaccatctctttcgtcgcatcaacaccgatgcactcctgtacataaggagaaaatgccagggccgtatggccggcgcccgctccgatatccagcacccgatgctctgcccggcattccgctgttttgatcatcaaccccaaatcttccccctcggcaaataccttttcatcccgatacatctcggcgtttttagaaaacggtgtttcattagtcatttgaaccagctccttcttttcgtaaatgatgatatggattatgttagcaatttctgttatgattcgtccaagatataaaaatgatgaaaacgataggttcaacctatggaggctgaaatggatattaaagtgatggaatatgcagcggaaattgcccagcgccaaagctttacaaaggcggcggaacatcttcatatcgcacagccgtctctcagccagcaaatcaaaaagcttgaggctgagctagggcttaccctttttcacagatcccatggctctgttacattgacaccccacggcaggcgtttcattgaaaaagccgaggacatcattcgttccagagatgatttgcttcgggaaatgcaggagcgatcacagggaatcggtcataaattatccatcgggattcctgctgtaacagggagatatctctttcctccgctgctgaagcagtttttggcgcgctatcctcatgtggaggttcagcttgttgaaaaagattcggtttcattagaggagatgacggcaaagggagaagttgacctttctgttttatccttgcccatcgaggatgaacggctctccattatacccttgctcacggaaccagttgttctcgcagtgccgaaggaaaaacaaaggtggatgccgccggaaatggtcgcgctgattgagaaagcgctggaagaagatgagggacaccagccgtgtgtgccgcttgacatggtaaggaacgtgccatttattctgttaaaagaaggcttcggctttcgcaggacagttctcgatctctgtgcggaaagcggctttaagccgaatgctgcctttaagacaagccatattgaaaccgcccaatctcttgtggctaacggattaggtgtgacaatggcaccgaatatggtcagaagggataaagatccgggtgtgatctatttattgattcaatccgcgccatcacgaaccctcgtcttcgtctttttaaagaaccgctatgtcagtctgaccgcccaggcctttatggaactaacccgggaaagtcttaaacaaacgtttgatgaaggctgtctgggaaacaaagatgaaaatatttagaaaacaaagccgaaacgtggtagtataggaatacaaactaaatcttataaaacaaaggggaataatcggaaatgcaactattcgatctgccgctcgaccaattgcaaacatataagcctgaaaaaacagcaccgaaagatttttctgagttttggaaattgtctttggaggaacttgcaaaagtcaaagcagaacctgatttacagccggttgactatcctgctgacggagtaaaagtgtaccgtctcacatataaaagcttcgaaaacgcccgcattaccggatggtacgcggtgcctgacaaggaaggcccgcatccggcgatcgtgaaatatcatggctacaatgcaagctatgatggtgagattcatgaaatggtaaactgggcactccatggctacgccgcattcggcatgcttgtccgcggccagcagagcagcgaggatacgagtatttcaccgcacggtcacgctttgggctggatgacgaaaggaattcttgataaagatacatactattaccgcggtgtttatttggacgccgtccgcgcgcttgaggttatcagcagcttcgacgaggttgacgaaacaaggatcggtgtgacaggaggaagccaaggcggaggtttaaccattgccgcagcggcgctgtcagacattccaaaagccgcggttgccgattatccttatttaagcaacttcgaacgggccattgatgtggcgcttgaacagccgtatcttgaaatcaattccttcttcagaagaaatggcagtccggaaacagaagtgcaggcgatgaagacacttgcatatttcgatattatgaatctcgctgaccgagtgaaggtgcctgtcctgatgtcaatcggcctgattgacaaggtcacgccgccgtccaccgtgtttgccgcctacaatcatttggaaacagagaaagagctgaaggtgtaccgctacttcggacatgagtatatccctgcttttcaaacggaaaaacttgctttctttaagcagcatcttaaaggctgataaatgtgaaaagccgccgcatatcatcaggcggtttttttctgcaaactgccggaatgagaacagactggagacgaatagatatgaaacaaagaatcattgatgaattaaaacggatcgagcagtcatacggagtcaaaatcgtgtatgccgtcgagtcaggaagccgcgcatggggatttccctcgcaggatagtgattacgacgtccgctttatttatgtgccgaaaaaggagtggtatttttcaattgagcaggagcgtgatgtcattgaggaaccgattcacgatttgctggatatcagcggctgggagctgagaaaaacgcttcggcttttcaaaaagtcaaaccctccgctcctcgaatggctgtcctcagacattgtgtattacgaagcatttacgaccgcagagcagttaagaaaactgcgcacggaggcatttaagcctgaagcaagcgtgtatcactatatcaatatggcgagaaggaacgtcaaggattatctacaaggacaagaggtcaaaattaaaaagtacttctacgttcttcggcctattttggcctgccaatggattgaaaagcacggaaccataccgccaatggactttactgttttgatgaatgaacttgttgctgaacccgagctgaaggctgaaatggaaaccttgcttgaacggaaaagaagaggagaagagcttgacctcgaagcaagaatcaatgttattcaccaattcattgaaacggaaatcgaaagaatcatggaagcggcaaaagaactgaaggcagagaaaaaagatatgacacctgagttgaaccgtttgcttttgaatacggttgaagaagtgtggaaggatggaggaagctgatgttttttgtcgcttccttttctcctttattcgacagaatcccccccgactttctaactatctgattgtgacaaacccacaaaaataatcagaatctttgtattttgagaatattgtgaacgtcggttttgtccatttacaataaactcatacaaatacttcttagattgcggggtgttgaggttggaagtgatcacaagagattttttcttatttttatccaaaagcggctttctcaataaaatggcgaggaactggggaagccgggtagcagcgggtaaaattatcggcgggaatgactttaacagttcaatcccgactattcgacagcttaacagccaaggcttgtcagttactgtcgatcatttaggcgagtttgtgaacagcgccgaggtcgcacgggagcgtacggaagagtgcattcaaaccattgcgaccatcgcggatcaggagctgaactcacacgtttctttaaaaatgacgtctttaggtttggatatagatatggatttggtgtatgaaaatatgacaaaaatccttcagacggccgagaaacataaaatcatggtcaccattgacatggaggacgaagtcagatgccagaaaacgcttgatattttcaaagatttcagaaagaaatacgagcatgtgagcacagtgctgcaagcctatctgtaccggacggaaaaagacattgacgatttggattctttaaacccgttccttcgccttgtaaaaggagcttataaagaatcagaaaaagtagctttcccggagaaaagcgatgtcgatgaaaattacaaaaaaatcatccgaaagcagctcttaaacggtcactatacagcgattgccacacatgacgacaaaatgatcgactttacaaagcagcttgccaaggaacatggcattgccaatgacaagtttgaatttcagatgctgtacggcatgcggtcgcaaacccagctcagcctcgtaaaagaaggttataacatgagagtctacctgccatacggcgaggattggtacggctactttatgagacgccttgcagaacgtccgtcaaacattgcatttgctttcaaaggaatgacaaagaagtaaaaaaggagagattatcatgacaacaccttacaaacacgagccattcacaaatttccaagatcaaaacaacgtggaagcgtttaaaaaagcgcttgcgacagtaagcgaatatttaggaaaagactatccgcttgtcattaacggcgagagagtggaaacggaagcgaaaatcgtttcaatcaacccggctgataaagaagaagtcgtcggccgagtgtcaaaagcttctcaagagcacgctgagcaagcgattcaagcggctgcaaaagcatttgaagagtggagatacacgtctcctgaagagagagcggctgtcctgttccgcgctgctgccaaagtccgcagaagaaaacatgaattctcagctttgcttgtgaaagaagcaggaaagccttggaacgaggcggatgccgatacggctgaagcgattgacttcatggagtattatgcacgacaaatgatcgaactggcaaaaggcaaaccggtcaacagccgtgaaggcgagaaaaaccaatatgtatacacgccgactggagtgacagtcgttatcccgccttggaacttcttgtttgcgatcatggcaggcacaacagtggcgccgatcgttactggaaacacagtggttctgaaacctgcgagtgctacacctgttattgcagcaaaatttgttgaggtgcttgaagagtccggattgccaaaaggcgtagtcaactttgttccgggaagcggagcggaagtaggcgactatcttgttgaccatccgaaaacaagccttatcacatttacgggatcaagagaagttggtacgagaattttcgaacgcgcggcgaaggttcagccgggccagcagcatttaaagcgtgtcatcgctgaaatgggcggtaaagatacggttgttgttgatgaggatgcggacattgaattagcggctcaatcgatctttacttcagcattcggctttgcgggacaaaaatgctctgcaggttcacgtgcagttgttcatgaaaaagtgtatgatcaagtattaaagcgtgtcattgaaattacggaatcaaaagtaacagctaaacctgacagtgcagatgtttatatgggacctgtcattgaccaaggttcttatgataaaattatgagctatattgagatcggaaaacaggaagggcgtttagtaagtggcggtactggtgatgattcgaaaggatacttcatcaaaccgacgatcttcgctgaccttgatccgaaagcaagactcatgcaggaagaaattttcggacctgtcgttgcattttgtaaagtgtcagactttgatgaagctttagaagtggcaaacaatactgaatatggtttgacaggcgcagtaatcacaaacaaccgcaagcacatcgagcgtgcgaaacaggaattccatgtcggaaacctatacttcaaccgcaactgtacaggtgctatcgtcggctaccatccgtttggcggcttcaaaatgtcgggaacggattcaaaagcaggcgggccggattacttggctctgcatatgcaagcaaaaacaatcagtgaaatgttctaagcgggactaaatgggcatcctccctgcgggggtgtccatttcatccatatactataaaaaagaggaggaagtgccatagaaaacacacagctgattatttcgatttgtatttatatggcgggaatgctgctaatcggctactttgcttacaagcgtacgtcgaatctgacggattatatgctgggaggacgctctttgggtccggcagtaaccgctctcagtgccggcgctgccgatatgagcggctggctgctaatggggcttccgggcgccatgttttctactggtctgagcggcgcttggatcgtcatcggactttgccttggagcgtgggcgaactggctttacgtcgcaccgcggctgagaacctatactgaaaaagcggggaattctattacaattcccggattcctggaaaatcgcttcggagatcaaacaaagcttctcagactgttttcgggaattgtcattttagtctttttcacgttttatgtatcgtccggaatggtgtccggcggcgttttattcaacagcatcttggggatggattatcacactggcctgtggattgtgacgggtgttgttgtggcatataccctgtttggcggctttttggcagtcagctggacagattttgttcaggggatcattatgtttgccgcactcattcttgtgccgatcgttacgtttttccacacgggaggagcaggtgatacagttgctgaaatccgctctgtagatcctgatatgtttaatattttcaaaggaacgagcgtccttggcattatttctttgtttgcctgggggctgggatactttggccagccgcatattattgtgcgttttatggcgataacgtccgtaaaagagatcaaaagagcgcgcagaattgggatgggctggatgattttgtctgcagtaggcgcagtgctgaccggtttgggcggaatcgcttattaccatcagcgcggcatgacactgaaggacccagagacgatttttattcaattagggaatatcttgttccatccgattatcacgggttttctgatttcagcgattttggccgcgattatgagtacaatttcttcccagctgcttgtgacatcaagctctctggtagaagatttgtataagtcgatgttcagacgctcagcttcagataaagaactggtgtttttaggccgactggctgttctggctgtttcaattgtcgcgttggttctggcttgggagaaaaataacaccatccttggattggtcagctacgcgtgggcgggcttcggtgcatcattcgggccggttgtactgctcagtctgttttggaaacgaatgaccaaatggggggcactcgccggcatgattgtgggagcagcgactgtaatcatttgggcgaatgccggtctttcggactttctgtatgaaatgatacctggttttgctgcgagtctattatccgtcttttttgtcagcatattgacgcaggctccgtcacaagctgtcacagaccagttcaacgactaccaagatacaatgtcacaataaagatcgaaaggaggaggaaggggctgtccctttttcctcttttctccttttaagcggccatttttttcttttggaaacaaacgtatttttttctatacaaaaagaccccgtatggatatgattaaagtaaaaaaagtataggagaaaaaggtatggaagagcttttagagagagttttttcattttcagatgttgataagctgattgattttattagctatgaactgcaaaagccagtgatactggaaagcgcggatttctttttgttagcctataattcttactatattaaccattttgattctgccaaccagcagactattttttcgaaaaagtgtccggtccagatttttgagaggtttctgaaggacggaattattgaaaaattgaaaacagagcctgagccttttcgcgtcaataaaattgaaagcattgggttaaaccagagggtggtcgtgagtgcaaagcacaaaggggaagtcatgggctacatctggattcaggagctggaccaaaatctgacggatgaagagctcgactttttgtacgagacctccttccatgtcgggaaaatcatttataaaacgaataaattgaaacaggaaaaggaagaaaaagcagaggatctcatcaaacgggcgatctatcagcaatttacctctgagaaggaactcagacgggaagctgaaaggatcaacaccgtgctgccttccatgttttcagttgttatcctgcacgccgcaaatggggatggggaagcggttgaggatttaaaggaaaatatcaggtcgtacctgaatttacgggataaggtcagtcatgtcttaacgatcgaatcaaacattgtcatcgtcgtagcgagtttttcccaaaaaagctccgtctcctcagcagcttctgagtttattaacaagctgttaacacattttcactttcaaaaaatacctacccctatttatatcggtatcggaaacgaatataatcacctattaaaacttggcaagagctacacagaagcacttgaagtcatcaaagccgcagaaatcaccggcaatcaggaaaacattccatatgaatatgccaaactcggcatttaccgctatttagaaagcatcgaacagaaaaatgaatttttagaatacgagaataaagatttagctttattaaaagcaaaagacgaagaaagcagcactgagctgctcaaaaccttggaaatctatctcctcaacaactgcaaaacaaaaccagcggcagaacagctgtttattcaccaaaatacattgaattaccgcatcaaacagattactgagatgacgtcgatcgatttaagcgatttcagaacgcggtgccagctctatctcgatttgatgctgatgaaaaagaaataaaaaagaaaccagtacttgtactggtttcgtcttcacttaaaatcctctgtaaacatacggatcatcaggttttttaatggtattccagtcagttactttgacgacagggagagttgacttgaatggctggtaatactctgaggccagagtgcccttaatgtgaatccattcatcatccttgatgtccatgtccttcggaaattccacaagcatcccgtacacgccggaatcagcgatacagtgaatgatgccaaaccttaatacgaacagctgatttttgttaattgcgtttcctttgtaagcaaatccatggaattctatcgtccgtccgagaaattcacccggatagttatagatggtttccattccttttaggaaatcgtcatcggtcagagaaatctcttttttgctggaatacttattaaacagctgtttcatttgtttgtcatagctgtcttgcgcgtaataaaggctggcatcaggccgcaaatactgtgtttgggagtaatgatctccgctctccatcgccttaaacgagaacccttttgttttgacaatggatgagtcaagcgttgcaatcgggaagaagatgcctgacaccaaaggaaaaagaaaaacaacataaatcaaataacgctgataaaatggcttgttttgttcatggtcatgctcgtgatcatggccgcacccgcaatcatggtgacccccgcttttttcaggcgacttgataaatagatatgcttggacggcggtcagaatagccagcaggaaaatcgcaataaaggatagataggaatatttcatattgatatattttgttagatttcctgaggcatgcagatgataaaagaaaaacgtaaatcccatcagcaccaataaacgaaacatccaatcacccctttaccagtagtgatcccgctaaaacaatcacgacaatatatgtaatcagcaggaaaacaaatcgttttttgaaggctgcaagcatcatcaatagattcttaatatccaccattgcgccaaagacgagaaaggcgattaacgatcctaatgaaaatgtgctgctgaaggaagacgcgatgaacgcatcaacttctgaacaaagcgacaggacaaacgccagacccatcatcacgagggaagaggatacatcattctgcccgatcgcaagcagagtggatgttttgacatacgtctgcatagcggctgcgataaaggcgccgatgattaaatatttccccacggagaaaaattcatcaatggcatgccgcaaggtcccgcccagtttttggagcaaggtgccgtgatgatggtggtggtgcccgggttcatcaggctttaaaagctggttatctttaaattgataggataaaatgaccccgatgatcagcgaaacggcgagagccagtccgcctctgtaaaagaccacgctccatctattcccgaacgcaatataagtagaaaataaaacgataggattaatgataggcgcggtcagcatgaaagcaacgcccgcatgcagaggaactccctttaacagaagccgcctcgtaatcgggatgatgccgcattcgcaggcgggaaataaaacgccggccagcgcaccgaataaaacggcgagaaaacggtttttcggcatgattcttgcaatcatttcttcagaaacaaacatttgaatgattccggaaagtatgacgccaatcagaataaacggaatggcttctattaaaatgctgataaaaatagaattcagctgaagaaaagatgattgtgctgtcacaataaaacctccgctcatgttaagctgcctttcttatgataccagaaaaaaaggcactgcttgtttgacggaggaagggaaaggatcgtttcactttggttaggattccaaaaaaccgagtaggatactgtctgtttctgcagcttcttttccgagccaaatcaggtgtccccatgagtgaagcaaacagagaacagcgccacgaatgtgctcttttgcatgatgtgcatgtgacaagtcaaccaatccatcataaacactttgcataatcagcacgggacatatgatggcttgcaggtcttttaaagagacagcggcggtttgtgacaagtcaatcagaaatccttcacccgagcgctgccggctgttcattttccgaaatgcttctatgtctttttcattcatcaaggacttgattcgctgaaacggaagcgtgctgaattgggggctcatagctcgaaacatcaaacgcgggaaagcgttattcaaggaagaaatcagcttccatatccacttttctaccggcgggcggaagagaattttccccaatttatattcagtgtcttttggggtgagccactctttggtgactgcggattgcagggtcaatgtatttactcttttcggataatgtgaggcaaagcatatgccgctcggccctcctgctgagatggcgatcacatggacactctcgatttgtagatgatctaataatttcacatagaaacggcaggcattggcaagactttttccaatttcttttgacgtccgtccatagccaggccttgaaggcgtaatgatggaatacccttgctcaatcaacgctgtgtatccgtattcctcgtaacaatttgaatgcccgccatgcatgacaaggatcggagttcccttgcctgtcacagaatattctagtgtactgccatcgaaggtgatcgtttcgactcgtcttttcatctgttactcccatttgttttttgcctattatagggttttcagcaattgaccacaaggtgaagaaatgaataaacacaagctcgtgaaatatgatatactttgtattgatattcattctcaattaaaatgatttgatatagatgtgaacgggaggcaggacggatggctgagaatcaagaggtatatgacgttacgataataggcggggggccgatcgggctgtttactgctttttactgcgggatgcgggagctgaaaacaaaggtaatcgaatttttgccgaagctcggagggaaggtgtctttattctttcctgagaaaatcattcgcgatatcggcggcataccggggattgcgggaaagcagctgatcgagcagctgaaggagcaggcggcaacgtttgatcctgatatcgtattgaatcagcgtgtgaccgggtttgaacgcctagatgacggcaccattgttctgacgggttctgaaggggagaagcactatacaagaactgtgattttggcttgcggcatgggtacacttgaggtcaatgagtttgacagcgaggatgcggccagatatgcgggcaaaaatcttcattatggagtggagaagctcgatgcgtttaaagataagcgcgtggtgatatcaggcggcggagatactgcggtcgattgggctaatgagcttgaaccgattgcggcgtctgtgactgtcgttcatcggcgtgaggaattcggcggaatggaaagcagcgtgacgaaaatgaagcaatcatcggtgcgggtgcttacgccttatcggctggagcagttgaacggagatgaagagggcatcaaaagcgtgaccgtttgtcatactgagtctggccagaggaaagacatagaaattgatgagctgatcattaatcatgggttcaaaattgatctcgggccgatgatggagtgggggctggagattgaagaaggaagggtgaaagctgacagacatatgcgaacgaatcttccgggcgtgtttgtggcgggcgacgcggctttttatgaaagcaagctgagattgattgccggcggatttacggaaggcccgacagcggtcaacagtgccaaggcttatctggaccctaaggccgagaatatggcgatgtattccacccatcataaaaaattggtgcataaataaaacagcccttgggggaaagggctgccagccatcagctgtgaaggagctttttctgcgtctgttgattctgaatgaaagctagcaattcatcctgttcttgtacagctgtgaatccataagcttcggcagctgagtcatcgcctatacagacgatagggggccggcttgctgacaattccggcgaaatgccaatttgttcgccaccattgatcaattgctgaacggacagcttgttcgggcaaatgaccatgtgcagcggggattcactgatggtacgctgaatcatgtgggtgaaccggtcatctatgacgttttcatgagtgatataaaacgaacaggattcatgcttttgcatgttttccactgcatggcggctcccgacaacaagacgtttctctgaatcaggctgaatggcggtgacaagaaagccccgtttctcaagctctgtctttgcttgctcagatgctgcactcagtttggctgtcagctggcggatgtcgattttctgagaagccagtgctctgaaaaattcacaaaccgcccggcgcgatgtgaaaaaaacgtcttcaaaggtgccaatctttcgaagaatttcttcattgacaggcatgttttcggtccgccatttcggccactcgatgagatcggcgccggaatcgcgcagcttgtctgcaagcgggtcttcatcttcgccatgagtcacaaccatcaaatgccgtccgatgagcggtttgctttcaaaccagctgtgtgtttgaaagttgacgatgtctccgatgacgataatcgcagggtttgtaatctggtgttcctgcactttttgctgaatgttctcaagtgttcctttcacactccgctggcggccccacgttccccattggatgacaatgacagggacagaaggcgatttcccgtatgaaataagctgctggcaaatataagacaagttcttgacacccatgtaaaaaacaagggtttgaacgcttcgggccagcccttcccagtcaaggttcggcgtgccttttaatgatttatcatgcgctgtaatcatggcaaaagacgatgcaaaatcccgatgcgtgacggggatgcccgcatatagcggcgctgcaattccagaggtgattcccggcaccatttcatagcgaatgccgtgctcatgaagagcatctgcttcctcgccgactctgccgaatacgctcggatctccgcccttcaagcgaacgacggttaacccatttaatgctttttcaaccagcagggcgttaatttctttttgtttcataaaatggcggtttggcagttttccgcaataaataaactggcagtccggtgatgcaaattcgagcagcttcgggttggcgagccggtcatataaaatcacatctgcttccttgagcgcctgttttcctttgatggtgagcaggcctgggtcgccgggtccggctcccacgaaatatacgattccgttcttcatgatcatgtcatccttccgtcactgtaaaaaatgaaggaccactagaaaagtgatccggtcttttgatcaatatacgagataaacatgttctccttcgatcagcgtttcatatgttttgacgcatccgtggtcaggttcttggacgattccgtcttctaaggaaattttccagtcgtgcatcgggcagaaaacatattgaccgctgacgatgccttctgccaggacgccgcccttatgcggacagcggttttcaatggcgcggatgcttccgtctgaaagcttgaaaaccgcgagctccttatcttcaatatacactgttttgcctaattgttcaggcaattcttcaatttttccgatacatacttttgttacgtctttgtttaccatgtccattcctcctcaatgatagtttttgtcattatgatgtggtcacgacattttcaaataattctttagaggtttgtttatcctctaaaaagtctttccacggatccttgtggacagagagtgtttcattcattcggccgttcagctcctgccgcttttccggatcgtttaacacggattggacatgggataaaccgacgcgctcaagccatgcggacgtacgctccagatagtttgcggtttccctgtaatattgcaggtaagcgcctgcgtattctaagacttcttcatttgttttcaccttcatcagcaaatcgccggcacgcaagtgggttccgccgtttccgccgacataaagctcccagcctccgtcgatgccgacaacgccaaggtccttaatgccggattccgcacagtttcgcgggcatgcagacacggccattttgactttgtgcggcgtgtttagcccttcgaattttttctcaagcgcaatgcccagtgccatggagtcttgtgtgccgaagcggcagaattgctcgcctacacatgttttcactgtgcggagcgtttttccgtatgcgtagcccgacggcatatcaagatcttcccataccttcggaaggtcttcttttttcacgccgataagatcaattcgctggccgcctgtcattttcacgagtgggatctcatatttgtcaacgacatcggcgatcttgcgcaaatctgtggagttggtcacgccgccgtacatccgaggaacgactgagtatgttccgtctttttgaatattggcgtgcattcgttcattaacaaagcgggatgtccggtcatcctcgtatttggttggattgatcatgcctaagtagtagttcagagccggccggcatttggaacagccttctggcgttttccagccgagcacattcatgacttctcttgtatgtgacagccctttggctttgatttcttctacgacttcatctcttgacaatgtggtgcagccgcaaatggcttctttttgcgctgacgcatcaaagtctgatccgagcgtatgctggaggatttcttctacgagtggcttacagcctccgcatgagcgggatgcgccagtgcatgctttgatctcgtccgttgacgagcagcccttttcctgtatggcttgaataatcgcaccttttgacacgccgttacagccgcagatgatttcatcgtcgctcatcgctgcggtgatgcttgtgcctgcttcttggttgagaggctgtaagattgatattttagaggtttcagagatatcggcttctttttgaatcatagaaaacaggcgattgccttcgctgctgtcaccgaataaaacagcaccgacaattttgttgtctctcaggacaatttttttatagatgccgtcctgctcatcgaagactttaatcgcttttttgtcctctgattcatcaaagtccccggcagagaaaacctcgacgcccgatacctttaactgtgtggagagaacggagccctcatacgggtttgtttcgatgccgcaaatatgcttcgccagcacttttgcctgttcatagagcggcgccacaagcccgtaggcgattcctcggtgctcggcacattcgccgaccgcgtaaatgtgcgggatttcagtctgcatataatcattgacgatgatgccgcggttaaccggaatgccgctctcggccccgagcgttgtatttgggcggatgccgacagccatgacgactaaatcagcttcaatgcttgtgccatccttgaatcggaggccttcgacacggtcgtcaccgacaatttcttctgtttgcttttcaagtaaaaaggtcataccttgtttttctaactcgttttgcagcaggcgtcctgccgttgcatcaagctggcgctccatcaggaatggggcaaggtggatgacggacacatccatgccaagattcagcagtccgcgagctgcttccaaaccaagaagtcctccgccgatgacggcagcttttttatattgttttgacgcggcgagcattgtgtctgtatcttttatgtcccggaaagctgtgacgccttttttgtctgcgcccggaatcggaaggataaaagggaccgagcctgtcgccaggatcaattcatcgtaaggctggattctgtctgcatctgtgatgactgttttgttttccgtgtccactttgatgactgtttcatttgtatacaattgaatgttgttttcttcgtaccagtcccaatcgtttaacgtaatatctttaatatctgtatcgccttgaagcacttttgacaaaaggattcggttgtaattgggatgcggttcggcaccgaaaattgtgatctgaaactcgtctttagcaatactcagtatctcttcaatggcccttaccccggccattccattaccaacaagaactagctgtttttttcccatcagatgatccgctccttatcaatgttttttccagcgtagcacagcaaaaaggaatatttaagatacatgttataaaatgtaacaaaatatacgaaaagttctaaaaattttatgaaaaatttaaataggtctgattcggacggcgcataccttaaaaccgggcattttacaggctggatctaaggcttccccgattaaatcattcacattttgagcgtctgcccaatggatgggaacaaaaacagtatcttttctgatttgttctgataatttgctgcggacggtgatgcttccccgcggcgattctatttttaccagtacacggtcctcgatattgtaggtcgctgctgtttgcggatggatttccataaacgattcaaaatgtctcgcggcaagggcggcgctttttcttgtttggacgcctgttaagtagtgagacatgactctgcctgtcgttaaataaagcggataatcggctgtcggcttctcttttggaacaggtggttcgtttggaatcacacttaatgccgctttttgatccggatgagcaaatgattctgtaaacaagcgcccagttccgggatgatcagattccggacacggccaatgaatgccgccttcacgtctgagcctgccgtatgagatgcctgaataatcggcaatcccgcctcggctcgcttctctcaattcattaaaaatatcctccgctgacgtataagaaaagtagcggcccttgccgagagcggatgcgagatcacaaatgatctgccaatcatgctttgcttcgccggggcatggccggcttgcttctcttaatgtcacgcgtccttctacatttgtcatggtgccttcatcttctaagtaagaggaggcaggtaaaatcacatctgcgtatttcgcagtctcagaaataaacaaatcgattgcaacaaagaatgtcagtttccttaaagcctttttcacgagattcgcatttgggctggagacagcaggattggagcacatgaggaacaatcctttgatgtcgccgtcgttgattttttccatcatttcataggctgagacaccttttcgcggcagatcatcctgatggattccccacactttcgcaacatgtgcccggtgttgttcgttttcaatagatcgatagcccggaagctgatcggctttttggccatgctctcttgcaccttgcccgttgccttgtccggtgatcgccccgtaacctgagtaaggcttgccgatttttcctgtgatcagcaccatgtttaagaagcctttcacagccgctgttccatcggtttgctgttcaatcccgcgggctgtaaacagcatgccggacgtttccttggcaaactttacagccgcttttcttatatccaccagggggacactcgtctgttcggcgatgtcattcaggtccaacgagtcagtatgctgcttcagctcttcgaatccatttgttcgtgattgaatgaaatcctcgtttataagctgttcgtcgatgatgattttgacgagaccgttggcaagggcggcgtctgtgccgggtttgattttcaaatgaagatcggcgatttttgttgtcgctgtttcacgcggatcaatggcaatgatgtaagctccgttttctttcgctttttcaaaatatggcataatcgtaggctggcactccgcgatattggtgccggccagaatgatcacacgggtgtggggaatgtctgataagggattcgttaagcctctgtccgcgccgaatgtttggttggctgcggttgctgcggcggacatacaaagcctcccgttgtagtcgatgtattttgtctgtaagcccacccgtgcgaatttccctaacaaatacgcctcttcatttgtaatcgaggcgcttccgtataccgccatagcgtcatggccgtgttctgcttgtatcattgtcacttggtctttaatgtaattcagtgcttcttcccaggaaacaggcataaactcgccgtttttcttcagcagcggccgggtgatgcgggaggagttcagggcatgctggtgggcgttcatgcccttcatgcatagccgaccctgtgttgtaggattatcaatcccgatcgcagtgtactttttgcgcgtgacgatggtttgttccacgagctgcattttgcactgcatgctgcaaaacgggcattgagtgtcatatgttttttctgattggacgtcttgctgtttatcacggaaatatctaagcagtcgttcagtcaaaatgcctcatcctttcttatatgcacccgtctctacagtcgggttttgaatcagtgacagatctgtttggaggctttccagcagctgtgcccttaggtcttcttcgaatagcacttctctgatatgaacgatcccgagacggtctatccactgatgaacaccttctaagtaatgagccgtttcccgataatactggatcagtcctttgatcatgccggcagtgctgtcttcgttctcagtcacgcaaaacaaagctcctgaacgggcatgagttccccggacgccgccgatgtgaatgtcccagccagcttgtctccgaattgcgccgacatcttgcagggcggcatcggtgcagtctgtttcacatgataagctgatagaaatgggagcgggtaagggaagcgtctcaagttgtctttcgatttgggctgccagctgctgaatcgatcgattttgcccgcatgtacatgctttgatgctttgcagcgtgtgtcggtgttcattggtgtaaacgggcattttcagatcttttttcatgttcgggagatccgcaggcttgatcccggaaagcttcagcctttggccgtgagtgatggatacgtcgggaatgctgtatgcctcaatgatgttggcgatggttcttagctgctccgcgtttgtccgcccgccgtacatttgcgggatcaggatgcatgtctcttcagtggctggctcaggctggacaaacccagggtacagcatttccagatagtattgaatcgcaggaacacaagtactgcatccgttttttgttttccagccaagctggttcatcacttctgccggattagtgaatggcctgcgctgaagctcagcgatgatgtcgtcttctgtaaaatcagtacagctgcaaaacgaaggtgtgccggcgggcttcgtatattcgctgttggtcatgtatctcaaaaggtcttcaacgagcggtttgcatcctccgcaggacccagtggctttggtgcagtgcttgacttcctcaacagttgttaagcttttcgtgtacaccgcgtcttcaatcgcgcctttcgtcactgtgttgcattggcaaatcgtttcactggaaggcatggattcaaataaagggccgcttgtctccggttcgatgatctgctttttgacaatggagatgtctcgttgtttaagcaggctgtcgagaagccgctgcttgtcatgggtgtctccgaataaaataacgccggccagtttgtcatctacaaaaagtgcttttttataaacgcctgcttgttcgtcgtagattttgatgctcgtcgtgcgttcatcctcttggatctttcctgctgaccacacatcgattccagctatttttaacgccgaagatggtgctgagccttgatattcctcacatggaacgccgcaaatatgactggcgagaacttttccctgctcataaagcggagccaccaatccgtacaccgttccgttatgctcagcgcattcaccaacggcgtagatattcggttcgcttgtctgcatgaagtcattcacgatgatcccgcggttcactttgattccagcagatacagccaattcaatattcggtttgacgccggccgccatcacaatcaagtctgcttttaatgaagagccatctttaaaatggattcggtctgccttcgtggcgccggaaatggagacggtgtctttctccaaaagaaaggttaggcctttttgttccagctctgtttgcagcagccgcgccgctgtttgatcgagctgtttttgcataatgccggcggagtggtgaatgacgctgacattcataccgagatgctgtaaaccgactgcagcttccagtcctaataagccggctccgattaccgcagccttttgaaagtgctgggccatcttcatcagtgcttggcagtcttctattgtccgaaatccatagacaccttttttgtctgccccggggatagggagaatatgaggggaggagcctgttgccactattaatttgtcatacgacagagtgcgtttccgatctgtgatgacctgctgctgatctgtatcaatttgaataaccttttcgcctgtgtaaagcgtgatcccgttcttgtcgtaccaatccttgctgttcagtgtaatgtcatcgagtgacgcttcaccctgcaatacagaggataagagaatgcgattgtaattgggatgcggctcgcttccgaaaatgacaatctcaaacatgtggcgattcagctttaatacttcttcaatacagcggattccggccatgccgtttcccgctaacaccaatctttgtttcttcatgtattagacctcctttggcgaagctcgtaagttttctcctattaaaaattatgtcacaatgcactgttaacgcattaaacgtgtcacaaaaacttacacatgtcttttccagaaaataatggtcctatatccttgattcagaaaatgtaaaataatgagggtctagaaaggggaatcttatgaagctgtcggaactgaaaactagcggtcatccactcactttgctctgttcctttttatactttgatgtcagttttatgatatgggttatgcttggggcgctgggtgtttatatttctcaggattttggcctgtctccttttgagaaagggcttgtcgtagctgtgccgattttatctggatcagtgtttcgtatcattcttggtattttaacggatagaatcggaccgaaaaaaacggcagtgatcgggatgctggtgacgatgattccgctgctttgggggacattcggcggccgttccctgactgagctgtatgccatcgggattctgcttggcgtggcgggggcaagttttgctgtagcgctgcctatggccagccgctggtatccgcctcatttgcagggacttgcgatggggattgccggagcggggaacagcggcacgttgtttgcaaccctgtttggccctcgtctggcagagcagttcggctggcacattgtcatgggaattgcgctaattccattattgatcgtctttattctttttgtatccatggcaaaggattctcctgcacagccggctccgcagccgctcaaaagctatctgcatgtgttcgggcaaaaggaaacatggtttttctgcctgctgtacagcgtcacatttggcggatttgtcgggctctcaagctttttatctattttctttgttgatcaataccagctatcaaaaattcacgcaggggacttcgttacattatgtgtggcggcggggagctttttccggcctgtcgggggcttgatttcggatcgtgtcggcggtacgaaagttctttctgtattgtttgtcatcgtggcactgtgtatggccggagtcagcagcctgccatctctctcaatggtcattgttctattgtttgtcggaatgatggggctcggaatgggtaacggtgcagtattccagctcgtgccgcagcgttttcgcaaagaaattggcatggtgacgggaatcgtcggtgcggccggaggaatcggagggtttttcctgccgaacatcttaggatctctcaaacagatgacaggcacatatgctatcggttttatcacgttttcctgtatcgcgctgctggcgtttgcacttgtgcttgccgcaggctattactggcggaaaagctggagcgcggaaagcagcccggcggatgtttaggattttgacggacacgcgtttgtgcgtgtcttttttattttctcttgattttcaacagtgaaccgatcaaaataaatagtaattattacgatttgttagtgagaggagttttctgaatgaatcaacatacgctgctcccgaaaaaaacggagcgtcttcaatactttggatcggtcagtccggtcaaaggcgagaaaccagtggaaaaagagaaaatgaaggacctgcaaaatatcaggaaggattatttttttgacattcagcatgtaggtgtcgctaatgtgtcccatccagtcacaatcacttctgccatgatgcctgccgagcaaacaacggctgcgaactttacaatgacttgtaatttgccgagaaatcagaaggggattaacatgagccggttaacagagctgctgcaagtctatcatcaaaatggctggattctctcattttcctctcttcagcaatttacgaaagagcttgcagaaaacatggacacatcatctgccacagttgaagtgaggtttccgtggtttttcgaacggaaaagcccgaagcttgagaaagcgggtttgatgcatgctgatatattcatgtctgtcacctatcacaaagatcagccgtttaaacagcgtgccggcatctcagcaaaagtaacgactctgtgcccttgctccaaggaaatcagcgaatacagtgcccataatcagaggggaacggtcagcatttgggcggatattcacccggccgcatcgctgccaagcgatgttaaagctgatttgcttcacgccgcagaatcaaatgcttctgcgagactgcatccggtattgaagcggcctgatgaaaaagccgtgacagaaacggcctatgaaaacccgagatttgttgaggatctcgtccggctgattgctgctgatttgtttgagcttgaatgggtgtcggcctttgagattgaatgccgcaatgaagaatcgatccatctccacgatgcctgcgcgaagctgcgtttttcgaaggaagtggataaaatatgaaactctcattattcattattgcagttcttatgccagtcagcctgctgtcagcctgctccgatcatgcagaagaacacgcaagtatcaatacaaagaaaacggtcgaaaacataacggacgttcgaaaaacagcaaaaacaagcattgattggacaaagccttcgggcggagaatacccggatattaaacagaagcatgtctggattgatgtgaatgtgaaggagcagaaggcttacatcaaggaaggaagcaacaccatctatacaatgatgatctcttctggtcttgatcaaacaaaagatgatgctacgccaaagggcaccttttatgtagagcctgaacggggagaatggtttttctccgaaggataccaggaaggcgcagaatactgggtatcatggaaaaatcacggtgaatttttatttcatagtgtgccaatgactaaggatcaaaaagtcatcaaaacggaagcagaaaaactaggaacgaaagcatctcacggatgtatcaggctgaccattccagatgcgaaatgggtatatgaaaatatccctgaacatacaaaagtggtgatcagctgaattgaaaaccgttgacaaaaaggaaaaaagaccatacaatttaaatcgtaacaattgcgttttatgataaatggcttatcattggctgtatctgtgaaaagcggaaaggctaaggatcttgctgtcattgatccccatgaagcgtctcttgaaaactggaaacgaaacccaagctactttctgatgagatatttgcgctttccatcggttcagcaacgcaagtggagcgattgctttatgcaagctgcggttttccgaatgtcggcaaggatttgcgatggggaaaaggattaaacgcggttgaagcctttactgatttagaaaccgggtggcagcgagaaatgagcgcgaaaagctgctctacactattgtacatatggcgaagtatacaatttaaatcgtaatcattctattttaatggaggcattattatgaaaaaaattccggttaccgtactgagcggttatctaggtgcgggaaaaacaacattgctgaacagcattctgcaaaatcgcgaaggcttgaaaatagcggttatcgtaaacgatatgagcgaggtgaacattgacgcgggcttggttaagcaggaagggggcctttccagaacagatgaaaagcttgtggaaatgtcaaacggctgcatttgctgcacgcttcgcgaagacttattaattgaagttgagaagctggcaaaagacggacggtttgattatatcgtcatcgaatcgacaggaatcagcgaaccgatcccggtggcccagactttctcttatatcgatgaagagatgggaatcgatcttacaaaattctgtcagctggatacgatggtgacagtggttgatgccaaccgtttttggcatgattatcagtcaggcgaaagccttctggaccgcaaagaggcattgggggaagaggatgaaagagaaatcgccgacctcttgatcgatcaaattgagttttgcgatgtactgatcttaaataaatgtgatttggtcagcgagcaagagctcgaacagcttgaaaacgttcttcgtaaactgcagccaagagccaggttcattcgttccgtcaaaggaaatgtaaaaccgcaggagattttgcatacagggttatttaacttcgaggaagcgagcggatcggccggctggattcaagagctgacggcaggccatgcggaacacaccccggaaacagaagaatacggtatctcttcatttgtatataagagacgtttgccgtttcattctacacgattttaccgttggttggatcaaatgccaaagaacgtggtacgtgccaaaggaatcgtctggtgcgcatctcataacaaccttgctttgctgatgtcgcaagcaggtccgtcggttacgattaagcctgtatcttattgggtggcggcgctgccgaagcttgagcaggagcaagtcaaacagcaggagccggaaatcctggaggagtgggacccggagttcggcgaccgcctaacgcagctagtttttatcggaactgacctggatgaagaaacgatcacgaaagagcttgatcaatgcctgctgactgaatatgaatttgattccgactggtcgctgtttgaggacccgtttaaatggaagctgaatcaatagaaaaaaagccgtcccctggggagcggctttttttaatgaaacgtttgtttaaacataatgagcgtattttttctcaaggatattctgaaagaccgcggcaatggagcagatggcccaataaatgagagcggtcagaatatacatggtcatataatcaaactctctgcccccgatgattttcgcatgctggagcaattccggcactgtaatcatcgcagcgagagatgatgccttgattaagtcgagcaatacattggcaagcggaggcagcgcaatacgtatcgattgcggcaaaatgatgcccctcatcgtctgccaataggaaagacccagcgaggatgcggcttcccactgtcctttttcgacggatgaaatggctgaacggttaatttccgcaatgtaggcggcgctgtttaggctaaagccgattaaagcagccgtgacagcggaaaattcaatgccgatataaggaaacccgaaataaaggataaacaaaatcaccaaaatcggaacgccccgcataaatgagatatagagcttcgccggccatcttaacaaagcaagcttagacattctggcgagtgatatgaacaggccgatcacagttcccgcaaacatgcttacaaaagagataagcagtgtatacccaatgccttttatgacataagggaacgattcaatagccagcttcgtgttgaaaatatattcccattgaatgctattgatcatggcgtccgattacaaatcaacgtcctgaacgtcggcatcaattttttttgatacatctgctttattgaagaattgtttcgacagtttagtcaaagagccatccttgctcatctctttcaatgcttcgttcatctttttctgaagtgccgcattgctttttttcatgacaagggcctgtttgttcggcatgtacttgatgtcaggatgaattgttatgttgagatccgggaatgccgcgagcgcaagtgtctgcaggtaatagtcgtttaaaatgacgtcagtgcgtccgttggcaacatcttttaaatattgctcattcgtcgcattatcataaatcacttctttggcgccgtattttctcgcgacctccatgtagacggttgtagccgcgccagccgctttcttcccttttaaatccttgagcgttttaatccctgataaattgtcttttcggacaattgccgtgccgtatgaatatttataaggagtagaaaatgcgaacttcttctcgcggtccttcgtcacatcgatgtcattcgcggctgcgtcaacctgtccgctgtttaccgctgtcagcatcccgtcaatgcccatctccttgaactcaaccttcaatcccaggcgttttgccgcttcacgaacgacttcaacctcgtagcccgtcagcttatcagagccagagtcagtatcgtgataagaagtgggataaagcgtgcctgatgtagcgactacgattttccctttatccttaatctgctcccagcctgtatccttggaatcggcttcatttttgccggaacaggctgccaatataagaaagaaagccattgtgaaactgaatataacggctttggaatgcatgaatgatttcacctatagttcccccaatctgttaatcaactaaaaagatagcattgaacataaggggttgcaatatgttgatcgcgttttcaaaaagttcgaattgtgtatacaaaaggcatgggtgggtgattaaaagcggctatgaagggaattggtgatgaacaaaggagttgtccaaggatgaatgcccgacgtaccaaggaaacacatgtggacgtgaaggatgcagtagatccgttattcctctatgccaataccgtaagaaatggtcagaagcatgaaatcgatcttcagaataaatttaagtcttgctgatgcccctaagacatatgatatatccgatgagaaagaaaatggaaacatttaaaccataatggggagtcaaatgaatatttacaaaccagccggattttggatcagacttggagctgcattgttagactatattatagtctccgtgccgcttttgctgatctattggctgattacaggaaaagacccaaacgacagcatgttcatcagtttggttgttctgctgtattctattttgctgccggtgttttggcgcggttatcttatcggaaaaaggatctgcggaatcagaatcgtaaaaaaagacggatcacaggtcagtctgttaacaatgtttttacgggttattgtagccggcctggtttacgttataaccttcggactcggcttgatcgccagcctgattctgattgccgtacgagaagacaaacggaccctgcatgatttaatcgcgggaacatcacttatgcgaccaggtgaagaagaacttaatgctgacgaagagattagaaagagcgaataatggttcgctctttttatttttatgcataaaaaatacaaggcagcaaaacatatgaaaaataggattggaggaataaactggatgaaacgaataaccatcaacattatcacaatgttcattgcagcggctgtcatttctctgaccggtacagctgaggccgctgaaaaacagcagcagtctcccgcaaatgttacactgacagatcagcaaaagaaagagattgaacaactggaagcagagattcttaaaaagcgcaaagacgtgatctcaaagtatgtacaatacggtatcctgcctaaagaaagaggagaacacatcaaaaatcacttggacaaacactttgaaatgatgaaacaaaacggctttgttccaaagcaccatcctcatccgcataaatttgaaaaaagacattaaaatggaaagcatccaatgggaattgggtgcttttttattgttaaaagttactgaatgaattttccggaaaaatatatcgcttttgttgattatatcttataataagatataaatggggtgtataatgatggaaatggatttaatctctaaacttaatcagcagtggacagatatttattatttattacattatcaacataaagataatatttctcaccaggcaatacggattatgcagcatattgaaaagcaaggtgaggcaacaataggagctttggctgaatacttgtctgtctctcacaatacggcgtcagagcatactaaacgtttgattcaaaggggatttatagctaaacggcgaagtcaacaggatgaacgaaaagttttagttttcttaacacaagaaggaagatctgttcttgaacagcatacacagctagataaagagaaattaaaagaaataattgaacgaatgagcacattagaaaaagaattacttgaacaggcatttgaacttttaagtagggaagctaaacaatggcagttttaagtaaagtgatcatctctgcgttgattatcggttttgttactgaaatatcaaaaagacatccgacctatggcggcatcattgctgctttgcccttggtcagtttattaagccttttttggatgcaaatacaaggtgaaaaaatagctcaattaagtcaatttgcatctggtgtgcttacaggaatcccagctacagtttgtttactagctattttggcttttttgctgaaaattcatgtgccgttttggtttgcattatgtgttggaatactaggatgggctatgtttttatggatgcagaagatctttctcaatatattatttaactgagtatagaaaggagatgctatgtttttaaaaaaggttactcttcttcgagataagattttggactttgacagatttccttttactatcccggctataagtcaattaaatgacatcttatttactagccaagtgactttttttgtgggggaaaatggatctggaaaatctactttgcttgaagcgatagcagataagtgtgaattcaatacagcgggcggaagccgaaataatgtctatgaattacgggagtcagattcccatttaggagattacatacgtttatcttggcttccaaaggtaacaaatggcttcttcttaagggctgaatcgttttatcatctttctcttcatctggatgagatggaactagatgctcctcagccataccgttcctatggagggagaccgctacacaatcaatcacatggagagtcctttatgtctctattccgtcatcgttttaaagagaaagcgatttaccttttagatgagccagaagcagcactttctccagctagacaattagcttttttgagagttatacatgatttggtgaagggcggaaatgtacagattatcattgcgactcactccccaatcctactgggctatcccaatgctaatattttaagctttgatggtggaagaatacatcatattgaatatgagaatacagagcatgttcaattaacacgatattttcttggacaaagagaaaaaatattagctgagctgttccgcgactaacatcgagttgatctgaaacgcgtttcatagcctatgataggtttatcaaataattcaggagtgataaacactatgatccaccagcatccagaatcttttccgaaacattttttgtggggctctgcttctgcagcgtaccagattgaaggcgcttggaatgaagatggcaaaggcccttctgtttgggatgtgtttacgaaaataccgggcaaaacgtttaaaggaaccaatggcgagattgcggttgaccattatcaccgatttaaagaagatgtcgctctgatggctgagatggggttaaaagcatatcgattttccgtcagctggccacgggtttttccaaaaggaaaaggagagatcaatgaagcaggtctagcgttttacgatagtctgattgatgaattgctttctcatcacatcgagccggttctgactttatatcactgggatttgcctcaagcgcttatggacgaatacggcgggtttgaatccagaaacatcatagaggattttaatcactactgtattactctttataaacgttttgaagacagggtgaaatattgggttacgttaaacgaacagaactacaattttaatcacggatttattacagccatgcatccgcctggagtgaaagacagaaaacgattttacgaagcaaaccatattgcgtttctggctaatgcaaaagccatcgaatcatttagagaatatgtgcctgaaggcaaaataggtcctagctttgcttattctccggcttaccctttatcaagccatccagaggatatactggcatttgaaaacgccgaagaatttatgaacaattggtggcttgacatgtattgctggggaacctacccgcaaattccattccgctacttggaaaaacagggatgggcgccgacaatcgaagcaggagatatggagctgcttgccaaagggaagcctgattttgtaggtgtcaattattatcagacgatcacctatgaacgaaatccgcttgatggtgtgtctgaagggaaaatgaatacgacaggccaaaaaggaaccaatcaggagacggggatacccggggtgttcaaaacgaaaaaaaatccgcatctgacaacgagcaactgggattggacaattgacccaattgggctgcgtatcggtcttcgccgaattacaagccgctatcagcttccagtgtttataacagagaacggtttgggtgaatttgataaagttgaggacggcactgtacaggatgattatcgaattgattatttgcgttcgcatcttgagcaatgcagacaagccatcagtgacggtgtcgatttaatcggctattgcagctggtcgtttactgatctgttaagctggctgaacggctaccaaaaaagatacggatttgtatatgtcaatcgtgatgaagaaagcacatacgatttaaaacgcttgaagaaaaaaagcttttattggtatcaagatgtcatcaagacgaacggagaaagtttataaagagtccctgagagttattctctcaggggtttttcattacacagaaacagcatcaataatataagtgtcggcgtgcaaatctgacatttcagccggcacagtccagcatgtcaattgatagtctcctttaggcagatcaaaggacagtcttttagacatgatgctttcaatatgaattccgttttctgtgacatgaaaaggaacagtcacttttttttcgtaggagcttactgtttctgaactgttcaggcgcaaaagaataaaggcctttgtatttcgctgtgcctcaaaggaaatggctccgtctgccgcagcatatcctttttcaatcgcttcgtcagtccaatccattacaggaggtgtagaatccttttgaaatacagtaaattgatgatatgaaatcgaaagttcttgcggcttccatgatttgatcaatgtgctgttcctcctctatgtactgtttactgaattgtgaataaaacctttgtgccgtctgggtaatcggtaagctgatgcccgacccaagagcctgctccgcggttgtcagcgggagaaatgtattctacagaagctccctcaccgccttctttgcacatggccattggccattcatctctgtcatacccctttttggaaggtacgtcctttaatgattgctcgcggcgttcctcagctccgtctctgtcaatagtgcacacctctgagtgcccctcatttatcgcatccttaatatgcttggcagtttcgggataacggtcagaaggaaaggtgattgtttcatcatattctttcgtttgagacgttttttgatcagctgagaaaaagtctccttttatcaggccgacagctgcagctgctatgatgacgatgacgagaagtatcgtttttatgatgtccgtcgtgatgttcacctcccgcttttaaaactgacacaagagtaatccagaaagcatttggtgtaaaggtttaaattttatgttttacgatcagtttattgcagaaatcgtaattttagcagatcgaaatatttgttttcagcaaaatacgattgccaatttacaataatgatagtaagtcatcagccgttttcggcttgattaatcattttaaattggcttatgataccggtaagctcctcagctaattgagaaagtgtttcagaagctgcggtaatctcctccattgcagcaaattgctcctctgttaatgcagccgcttgccgggtatttttagtagattctttaatgtcggccgtattggctgcaaaggaatcatttatttgatgtgcactggctgaaatgtttgttacagatgctgataaatcactaatctcggcgctgatttcacctgttgcagctgcaatttccttaaatgcatctctggtgcgctggatcatggtgactccttctgcagcttctgttttcacatgctcaacagatcttgcagaccggttcatatccttttgtatttctatgatcagttttgaaatctgccccgcagactgttgagactcttctgctaatttccgtacttcatcagcaacaacagcaaagccttttccttgttcaccggctctggcagcttcaatcgctgcattcagcgcaagcaggtttgtctgatcagcaatttgggtgatgaccgataaaatttgctcaatttgtttagagcggccgtctaactggtgtatgatttctccgcttttctgaattgactggtgaatcgcatccatttgcgcctgtacatttgcaatttccttttgtccaatgtctgcttttgattgagcgagctgccctttgtcagcgatagcggcagtatttgcagaaatatcccggatgtctgctgaagcttgttttaatgagctttcactattttcaattcgggtgatctgatcttgggctccatttgcaatctgctgtacagcttctgtgattttttctgaagcttgatttgtttcctctgctccggctgagagctgctgagaggctgacgcaagctgaagggctgattgttgtacggtttgtatggtatcgttcagcttcattctcatcttattataatagacgcttagttctgaaagctcgtcaccggttttgtctgacacctctattgtcatatctccgtttccggcactttcaaaggcgctttttaaagcgttcagccgcttgttgatttttctggtgaaaaccaaaacaaggatgactgatactataatgacgataacaagaacgatagcgaattgagtgaaaagtgattgtgtaagtgatgctaaaatactttgattagctccggtatacagcatgccgatgatgttgccattttgatcttttaacggcatgtatgcagtctgataagaagaacctgctacatctgcttgtccgtaaaaacgctttcctttctttaaaacagcggcaataacttcagaagaagcctgggtgccgacagctctttcgccattcttcatgacattggttgcaacacgagtatcgccttggaaaatggtaatggtatcacctgtcttttcaccaagcagatcaacaatatcttcatttccattgatttgtgtttgccctttatagagcttattgtttttcacctgccagtcgcctgacatgacatcatcaatataagtgctgcttaaagcgagatcacctttcgctttttcagttgccatttgtttcatgttttctgtaatttccttaagcatcacagtgccaactgatgccgaaaacaaaagaatcaccacgaaaacgaggcaaagaattttagttcctagcttcatcttaaatcgttttatcaacataattcctccctttacgatttgcaggtcatattacttatcgggtttttgggtttaaagttttattttagaaaaaataaaaccgacctgatcttcaggccggttgtgtgatgctattcaaggtttgcgtggtgagtgaacatagtttcagaatcgagtccttttttctccatgagttttaaaatcactgcatcatagaatagcagcaaagtttgttcaaataatgatcccattggctgaatggttttatagcttccgtttgactggtctttaggagaaccaggcattctgatgatgaggtccgcttgttttccgatgcttgattccggattgatggttaaagcggcaacaattccgtgtaagctttttgcttttgctgcggtatgaatcaagctttttgtctcgcctgatcctgagccgataataactagatctcctttggcgagcggcggagtgagaatctcacctacaatatgggcgttgaagcccatgtgcatcagtctcatcgcgaaggattttgccatcaggccagaccgccccgcacccgcggtgaaaatttggtgggatgaaagaatgtgatcggcaagctggtcagcttcttcattagaaatataagctactgaattgtgtaactcattgagaatttccgctacgtattcagtcgttttcataggagttatccttggacaatcagctgcttcatttttgaagctgtttccgccttatcagctgcgcttgtaattccgcccccaacaatgacaaggtcagggttttgcttgatcacttctggcagtgtatcaagtttgatgccgcccgcgattgcggtttttgcgttttttacggtatttttgattgtcgttaattcttcgaaagagtttttgccctctgcttgaagatcatagccagtgtggacgcagatgtagtcaacgcctagtgcgtcaatttctttcgcacgggattcgatatctttcacgttaatcatgtccactaagattttcttcttttgttttttggcttcttctactgcgcctttaatcgttgcatcgtctgtagcccctaaaacggtgatgatgtcagcgcctgcttccgacgctttcataatttcgtagcctccggcatccatgattttcaggtctgcaagaaccttcaattgaggaaatgcttcttttatttctttaacggctcttaggccttcattgatgacgaccggtgttccgatttcaactacgtcgatgtattgttctacctctttgacgagctcaatggcttccgggatgttgacgaggtctaatgcaagctgtaattccattgttgattcactccctttttcgaattatttttcattctataggttctcttatttgatgagaagtaggcactttgaagtcaacaagttacttggaggatactgtgaggagagacaatcagatttctttcgcttgattttatgagtgagtataatgaaaaaagagtctgcaaaaaagtaagtaagtgatgatacgtatctaacatacaaaaagattactaaggggggattctattgagccggatggacgacaaaaggtttaattgtgagaaggaattaacgcttgcagtgattggcggtaaatggaagatgctcattttatggcatttaggaaaagaaggcacaaaacggttcaatgaattaaaaacattgattcctgatattacgcagaagatcctcgtgaatcagctgagagaacttgagcaggatatgattgttcacagggaagtgtatccggttgtcccgccgaaggttgagtattctctgaccccgcatggagaaagcctcatgcctattcttgaagccatgtatgagtgggggaaaggctatatggaattgattgatatcgacaaaaatgtcatgaaagaatcgttgtaagacgctcttcgcaagggtgtcttttttttgcctttttttcggtttttgcgcggtacacatagtcatgtaaagattgtaaattgcattcagcaataaaaaaaaattgaacgcagcagtttggtttaaaaatttttatttttctgtaaataatgtttagtggaaatgattgcggcatcccgcaaaaatatccctgtaaataaactggaatctttcggcatcccgcatgaaacttttcacccatttttcggtgataaaaacatttttttcatttaaagtgaacggtagtaagataaaaaatattgaaaacaatgaataaatagccaaaattgtttcctgttaggataggggttcttgcggtctttatccgcttatgttaaacgccgcaatactgactgacggctgcccgttttaatagcggcaatctgttttttgtttggaagcactgctttttaagtgtagtactttgggctatttcggttgttagttcataagaattaaaagctggtatggataaaaaagagaaaatgctctgcacaagttcactgtttatgaagactaggggaggtatgaaaatatggaaataactttttatcctttaacggatgcacaaaaacgaatttggtatacagaaaaattctatcctcacacgagcatttcaaaccttgcggggattggtaagctggtttcagctgatgcgattgattatgtgcttgttgagcaggcgattcaagagtttattcgcagaaatgacgccatgcgccttcggttgcggctagatgaaaacggggagcctgtacaatatattagcgagtatcggcctgttgatataaaacatactgacactactgaagatccgaatgcgatagagtttatttcacaatggagccgggaggaaacgaaaaaacctttgccgttgtacgattgtgatttgttccgtttttccttgttcaccataaaggaaaatgaagtatggttttacgcaaatgttcatcacgtgatttctgatggtatctccatgaatattctcgggaatgcgatcatgcacatttatttagaattagccagcggctcagaggcaaaagaaggaatctcgcattcatttatcgatcatgttttatctgaacaggactatgctcaatcgaagcgatttgaaaaggacaaggcgttttggaacaagcaatttgaatcggtgcctgaacttgtttccctgaaacggaatgcttccgcaggaggaagtttagatgctgagaggttctctaaagatgtgcctgaagcgcttcatcagcagattctgtcgttttgtgaggcgaataaagtcagtgttctttcggtatttcaatcgttgctcgccgcctacttgtacagggtcagcggccagaatgatgttgtgacgggaacctttatgggcaaccggacaaatgcgaaagagaagcagatgcttggcatgtttgtttctacggttccgcttcggacaaacattgacggcgggcaggcgtttttagaatttgtcaaagaccggatgaaggatctcatgaagacactccgccaccaaaagtacccgtataatctcctgatcaacgatttgcgtgaaacaaagagctctctgaccaagctgtttactgtttctcttgaatatcaagtgatgcagtggcagaaagaagaggatcttgcctttttgactgagccgattttcagcggcagcggattaaatgatgtctcaattcatgtaaaggatcgatgggatactgggaaactcaccatagattttgattaccgcactgatttattttctcgtgaagaaatcaacatgatttgtgagcgcatgattaccatgctggagaacgcgttaacgcatccagagcataccattgatgaattaacgatgatttctgatgcggagaaagagaagctgcttgcgagggccggcggtaaatctgtgagctaccgtaaggacatgacgatcccggaactgttccaagaaaaggctgagcagctttcagatcatccagcggttgtattcgaagatcgtacattgtcctatcgaacgttacatgaacaatccgcacgcatcgccaatgtgctgaaacagaaaggggttggcccggacagtcctgtcgcggttttgattgaacgttctgaacggatgattacagctatcatgggaattttaaaagccggcggagcctatgtgccgattgatccgggttttcctgcagagcggattcaatatattttggaggactgcggggcggacttcatcctgactgaatcgaaggttgcagcgcctgaagccgatgctgagctgattgacttagatcaggcaattgcggaaggtgcagacgatatgacggaggctgatgtaaacgcgcggaatcttgcctacattatttacacatcgggaacaaccggacgtccgaaaggcgttatgatcgagcatcgccaggttcatcatttggttgaatctctgcagcagacgatttaccaaagcggcagccaaaccctgcggatggcattgcttgcgccgttccactttgatgcgtcagtgaagcagatcttcgcgtcgcttcttttgggacaaaccctttatatcgtaccgaagaaaacagtgacgaacgggaccgcccttgctacatattatcggagaaacagcattgaggcgacggatggaacaccggctcatttgcaaatgctggcagcagcgggcgattttgaaggcctaaaactgaagcacatgctgatcggaggagaaggcctgtcatctgttgttgcggacaagctgctgaagctgtttaaagaagccggcacagcgccgcgtttgactaatgtgtacgggccgactgaaacgtgcgttgacgcgtctgttcatccggttatccctgagaatgcagttaaatcagcgtatgtgccgatcgggaaagcgctggggaataaccgcttatatattttggatcaaaaaggccggctgcagcctgaaggcgtggcgggtgagctttatatcgcgggagacggtgtgggccgaggctatttgcatttgcctgaattaacggaagagaagtttttacaagatccattcgtgccgggcgatcgcatgtaccggaccggggacgtggtgcgctggcttccagatggaacaatcgaatatttaggcagagaggatgaccaggtcaaagtccgcggataccggattgagcttggggaaattgaagccgtgattcagcaggcgccagacgttgcaaaagccgttgttttggcacgccctgacgaacagggaaatcttgaggtttgcgcatatgttgtgcagaagcctggaagcgaatttgcgccagccggcttgagggagcatgcggccagacagcttcctgactatatggtgccggcttactttacagaagtgacagaaattccgcttacgccaagcggcaaagtcgaccgccgcaagctgtttgcactagaggtgaaggctgtcagcggcactgcctatacagcgccgcgaaatgagactgaaaaagcaatcgcagccatttggcaggacgtgctgaacgttgagaaggcggggatttttgacaatttctttgaaacgggcgggcattcattgaaggccatgacccttttaacaaagattcataaggaaacaggcatcgagattccgcttcaatttttgtttgagcatccgacgattgcggctcttgcagaggaagctgatcacagagaaagccgggcattttcggtgattgaacctgctgaaaaacaggagcattatccgctttctctggcacagcagcgaacatatatcgtcagccagttcgaggatgcgggagtcggctacaacatgcctgcggcagcaattctggaagggcctttagatattcaaaaactggagcgcgcatttcaggggttaatccgacgccacgagtcattgagaacatcatttgttcttgaaaacagcacgccgagacagaacattcacgatagcgttgatttcaacatcgaaatgattgaaagaggcggccgctcagatgaggcaattatggcttcattcgttcggacatttgatttggcgaaagctccgctgttcagaatcggtttgctggggcttgaagagaaccgtcatatactgctgtttgatatgcaccatttgatttctgacggtgtatccattggcattatgctggaggagttagcacgcatttataaaggcgaacagcttcctgagcttcgtctccagtataaggactacgctgtatggcaaagcagacaggctgctgaagggtacaagaaggaccaggcttattggaaggaagtctttgcaggcgagctcccggtgcttcagcttctgtccgattacccaagaccgcctgttcaaagctttgaaggggatcgggtgtcaatcaagctggatgcgggggtaaaggatcgcctcaatcgtttggctgaacaaaacggcgccactttatatatggtgatgctgtccgcttactatacgcttttgtcaaagtatacggggcaggatgacatcattgtcgggacaccgtcagcgggcagaaatcactccgatacagagggcattatcgggatgtttgtcaatacgcttgcgattcgcagtgaggtgaagcaagatgagacgtttacccaattgatctcgcgtgtccgcaaacgggtgctgaatgccttttctcatcaggactatccgtttgagtggcttgttgaagatttgaacatcccgcgtgatgttagcaggcatccgctgtttgacacgatgttcagccttcaaaacgcgacagcaggcattccggctgtcggcgatctgtccttgtctgttcatgagaccaatttcaagattgccaaatttgatttgaccgtgcaggcgagagaaaccgatgaaggcattgagcttgatttggattacagcacaaagctgtttaaacaaagcacggcaaacaggctgcttacgcattttgcgcgtttgcttgaagatgctgcggctgatccagagaagccgatttctgagtataagcttctttctgaagaggaggccgcttcgcaaattcagcagtttaacccgggcagaacaccttatccgaaagataaaacaattgttcagctgtttgaggagcaagcggcgaatacgccagaccatactgcgcttcaatatgaaggcgaatcactcacttatcgtgaactgaatgaacgggccaatcgtttagcccgcggcattctttctcttggagctggcgaaggcagaactgcggctgtcttatgcgagcggtcaatggatatgattgtgtcgatcttggcagtattaaaatcaggttcggcttatgttccgattgatccggaacatccgagtcagcggatgcagcatttcttccgtgacagcggagcaaaggtgcttctcactcagagaaaattaaaggctttagcggaagaagcggaatttaagggcgttatcgtgctagccgatgaggaagagagctatcatgccgatgcgcgcaatctcgcactgcctcttgattctgaagcaatggccaacctgacgtatacctctggaacgactggaacacctaaggggaatatcgtgacacatgccaatattctccgcacggtgaaggaaacgaattatctcagcattacagaacaggatacgattctcggtctttccaattacgtgtttgacgcgtttatgttcgatatgttcggatctttgttaaacggagccaagctggtgctgataccgaaggaaaccgttttggacatggctcgtctgtcccgcgtcattgaacgggagaatatcagcattctcatgattacaaccgctttgttccacttgcttgtggacttgaatccggcgtgcttgtcaacgcttcgcaagattatgtttggcggggaacgggcttcggttgagcatgtcagaaaagctttgcaaacggttggaaagggcaagctccttcacatgtatggaccgtctgaaagcacggttttcgcgacgtatcatccggttgatgaattggaggagcacacgctgtctgttccgattggaaaaccggtcagcaatacggaagtatacattcttgacagtacgggacacgtgcagcctgccgggattgccggagagctttgcgtcagtggcgaaggactcgtgaaaggctattacaaccgtccagaactgactgaggagaaatttgttccccatccgtttacatccggcgaacgcatgtataaaacgggagaccttgctagatggctgccgaatggcgacatcgaatttatcgggcgaatcgaccatcaggtgaagattcgcggacagcgcatcgaacttggagaaatcgaacatcagctgcaaacccatgatcgtgttcaggaaagtgttgtgcttgccgttgatcaaggagcgggagataaactgttgtgtgcttattatgtcggagagggagacatctcatcacaagagatgagagagcatgctgcgaaggacttgccggcatatatggttcctgcggtgtttatccaaatggacgagctgccgctgacagggaacggaaaaattgaccggagagcgctgccgattcctgatgccaacgtttcaagaggtgtttcatatgttgcgccacgcaatggaacggaacaaaaagtcgcagacatttgggcacatgtgcttcaggcagaacaagtcggcgtttatgaccacttctttgacattggcggacattcattagcaggcatgaagatgcttgccttggttcatcaggaactgggcgttgagctgtcactcaaggatctcttccagtcaccgacggttgagggcttggcacaggtgattgcctctgctgaaaaagggacagccgcaagtatcagcccggcagagaaacaagatacgtatcctgtttcttcaccgcaaaaacggatgtacgtgcttcagcagcttgaggatgcgcaaacgagctataacatgccggcggttctgcgcctgacaggtgagcttgatgttgaaaggcttaacagcgtcatgcagcagttaatgcagcgtcatgaagccttgagaaccacgtttgaaataaaagatggagaaacggtgcagcggatctgggaagaggctgagtgtgagatagcctatttcgaagccccggaagaagagacagagcggatcgtttctgagtttattaagcctttcaaaatcgaccaacttccactgttcagaatagggcttatcaagcattcagacactgagcatgtgctgctgttcgatatgcatcatattatttctgatggtgcatctgtcggtgtgctgattgaggagctttcaaagctgtacgacggagaaacccttgagccgctccgtattcaatataaggattatgctgtgtggcagcagcagttcattcagtctgagctttacaagaagcaagaagagcattggctgaaggagctggacggagagctgccggtgctgacgcttccgaccgattacagtcggcctgccgttcaaacatttgagggagaccgcattgcattttcattagaagcaggcaaagctgatgctctgcgcaggcttgcaaaagaaacggattccacgctttacatggtgcttctggcttcatacagtgcatttttatcaaaacttagcgggcaagacgatatcatcgtcggttcacctgtggccggacgatctcaagcggacgtcagccgcgtcatcggaatgttcgtcaatacattggcgctgcgcacgtatccgaagggtgaaaagacgtttgctgactatcttaacgaagtgaaagaaacggcactcagcgcttttgatgcgcaggattacccacttgaggatttgatcggaaatgttcaggttcagcgtgacacaagcagaaatccgttattcgatgcagttttttcaatgcaaaatgcgaatataaaggatttaacaatgaaagggattcagcttgagccgcatccgtttgaacggaaaacagccaagtttgacctcacgctgacggctgacgaaaccgacggagagcttacattcgtactcgaatacaatacagctctgtttaagcaggaaacgattgaacgatggaagcaatattggatggagcttttagatgatgttactgggaacccgaaccagctgctttccagcctgtcactggtcaccgagacagaaaagcaagcgcttcttgaggcatggaagggcaaagcgctgcctgtgccgacagacaaaacggttcatcagctattcgaagagactgtccagcgccacaaagaccgcccggctgtcacatacaacggccagtcttggacgtacggcgagctgaatgcgaaggcgaaccgtctcgcgcggattctgatggactgcggcattagcccggatgaccgcgtcggcattctcacgaagccgtcgcttgaaatgtccgccgcggtgctcggcgtcttgaaagccggagcggcgtttgtgccgattgatcctgactacccggatcagcggattgagtatattttacaggacagcggcgcgaagcttctcttgaaacaggaagggatttcagtgccggacagctttacgggagatgtcattcttctcgatggaagccgcacgattctaagcctgccgcttgatgaaaacgacgagggaaatccagaaaccgctgtaaccgcggagaacttggcgtacatgatttacacgtctggaacgaccggacagccgaagggtgtcatggtcgagcaccatgcgcttgtgaacctgtgcttctggcaccacgacgcgttcagcatgacagcggaggaccgcagtgcgaagtacgcgggctttgggttcgacgcttccatttgggagatgttcccgacctggacgatcggtgccgagcttcacgtcattgatgaagcgatccgcctcgatatcgtccgcctgaacgattattttgaaacgaacggcgtaacgatcacgttcctgccgacacagcttgcggaacagttcatggagcttgagaacacatcacttcgcgtattgctcattggaggagacaagctgaagcgcgcagtgaaaaagccgtacacactcgtcaacaactacgggccgacagagaatacggtcgttgccacaagcgcagaaatccatccggaggaaggctcgctttccatcggaagggccattgccaatacgagagtatacattctcggcgagggcaatcaggtgcagccggaaggcgtagccggagagctttgcgtggcggggcgcggactggcacgcggctatctgaatcgagaagacgaaaccgcgaagcggtttgtcgctgatccgtttgtgcctggtgagcgcatgtaccgcaccggcgatttggtgaaatggacgggcggcggcatcgaatacatcggccggatcgaccagcaggtcaaggtccgcggctaccggatcgagctctcagaaattgaagtccagctcgcacagctttctgaggtgcaggatgcggcggtgacagctgtcaaagataaaggaggcaacacagcgatcgcggcgtatgtcacaccggaaacagctgacatagaagcactgaaatcagcactaaaggaaaccctgccggattacatgatcccggcgttctgggtgacgctggacgagcttccggttacggcaaacggcaaagtggaccgtaaagccttgcctgagccggacatcgaagcgggaagcggagaatacaaagcgcctacgaccgacatggaagagctgcttgccggcatctggcaggacgtgcttggaatgtctgaagtcggtgtcaccgacaatttcttctcgcttggcggagattccatcaaaggaattcaaatggcgagccgcttgaaccagcacggctggaagctggaaatgaaagatctcttccagcacccgacgatcgaagagctcacccagtacgtagagcgtgccgaaggcaaacaggcagaccaaggcccggtagagggcgaagtcatcctgacgccgatccagcgctggttctttgaaaagaacttcacgaacaagcaccactggaaccaatcggtgatgcttcacgccgcgaagggctttgaccctgaacgggtggagaaaacattgcaggcgctgatcgagcatcatgacgcgctccgtatggtctatcgtgagggactggaagacgtcattcaatacaacagaggtcttgaagctgcttccgctcaattggaggtcatccagattgagggccaagctgcagattacgaagaccgtatagagagagaagcggagcgtttgcaaagcagcatcgacttgcaggaaggcggcttgttaaaagcaggattgttccaagcggaagacggagaccacttgcttcttgccattcaccacttagtggttgacggcgtgtcgtggcggattttactggaggatttcgccgcggtatatacacagcttgagcaaggcaatgaaccggttctcccgcagaaaacacattcatttgcagagtatgcagagagattgcaagacttcgcgaactccaaagcctttttgaaagaaaaagagtattggagacagctcgaagaacaagctgtcgcggcaaagcttccgaaagaccgcgaatctggtgatcagcgaatgaaacatacaaagacaattgaattctcgctgactgctgaagagacagaacagctcaccacaaaggtgcatgaggcatatcacacagaaatgaatgatattttgctgacggcattcggattggcaatgaaggagtggacgggtcaagatcgagtaagtgttcatttagaggggcatggacgtgaagaaatcatagaagacctgaccatttctcgcacagtcggctggtttacaagtatgtacccaatggtgctcgatatgaagcatgcggatgatctgggctaccagctgaagcaaatgaaagaagatatcagacatgtgccgaataagggagtcggatacggcattctgcgctatctgacggcacccgaacataaagaagatgtggcgttctcgattcagccggatgtcagcttcaactatttaggtcagtttgacgaaatgtcggatgcaggtttgtttacgagatcagagctgccatcaggacagtcattaagccctgaaacagaaaaaccgaatgcgctggatgttgtcggatatatcgaaaacggaaaactgacgatgtcactggcctatcattctcttgaatttcatgaaaaaacagtacaaacattcagtgacagctttaaagcgcatcttctcagaatcattgaacattgcctatctcaagacggtacggaactgaccccgagtgatcttggtgacgacgatttgacgctggatgagctggataaattaatggaaattttctaatagaggtggcatatgagcaaaaaatcgattcaaaaggtgtacgcactgacaccgatgcaggagggaatgctgtatcatgcgatgcttgatccgcattcttcctcgtacttcacacaattagagcttgggattcacggcgcttttgatcttgaaatctttgagaaaagcgtcaatgaactgattcggtcatacgatattctccgtacggtatttgtgcatcagcagctgcaaaaaccgcgtcaggtcgtgttagcggaacgcaaaacaaaggtgcattatgaggatatcagtcatgcagacgagaaccgccagaaagagcacattgagcgttacaaacaagacgttcagcgccaaggctttaacctggcaaaagacatattgttcaaggtagcggttttccgccttgatgcagatcagctgtatcttgtctggagcaatcatcatattatgatggacggctggagcatgggcgtcctcatgaaaagcctgttccaaaactatgaagcgctcagagcaggaaggacacctgcaaacggtcaaggcaagccttactccgactacatcaaatggcttggaaaacaggacaatgaagaagcggagagctactggagcgagcgcttggcgggttttgaacagcccagcgtgctcccgggccgcctgcctgtaaaaaaagacgaatacgtcaataaagaatattcctttacatgggacgaaacactggttgcccgcattcagaaaaccgcaaaccttcatcaagtgacagggcctaacctatttcaggccgtttgggggattgttctcagcaaatacaactttacggatgatgttgtcttcggaacggtcgtctcaggaaggccgtctgaaatcaatggaattgaaacgatggcggggctgtttatcaacaccattccagtgcgggtgaaagttgaacgagatgctgcattcgctgatattttcacagctgttcagcagcatgcagtagaggcagagcgttacgattacgtgccgctctatgagattcaaaaacgctcagctcttgatggcaatctcttaaaccatcttgtcgcgtttgaaaattatccgcttgatcaagagcttgaaaacggcagcatggaagaccgcctcgggttttcgattaaggtagaaagcgcatttgaacaaacgagcttcgatttcaacctgattgtgtatccgggcaaaacgtggaccgtcaaaattaaatataacggagccgcctttgattccgcttttatcgaacggacagcggagcaccttacccgcatgatggaagcagctgtcgatcagccggccgcttttgtgcgtgagtacgggcttgtgggagacgaagagcagcggcaaattgtcgaggtgtttaacagcacgaaagccgaactccctgcaggaatggctgttcaccaagtgtttgaagagcaagcgaaacggacgccggcgagcactgccgtcgtatatgaaggaaccgtgctgacgtaccgcgagctgaatgcagcggctaaccgtctggcgagaaagcttgtcgaacaaggccttcaaaaaggggaaacagcagcgattatgaacgatcgatcagtagaaaccgttgtcggcatgctggctgtgttaaaagcaggcgccgcatatgtgccgcttgatccagcgcttccgggggatcgtcttcgtttcatggcagaggacagctccgttcgaatggttttgaccggaaattcttatacagggcaggcacatcagctgcaggtgccggttcttacactggacataggcattgaagatggcgaagctgacaatctcaacctgccatccgccccgtctgatttggcgtacatcatgtacacatccggttcaacgggcaaaccgaaaggcgtcatgatcgaacataaaagcattctgcgcctcgtcaaaaatgccgggtacgttcctgttactgaagaggaccgcatggcgcaaacaggggcagtcagctttgatgccggaacgtttgaggtattcggcgcactgctgaatggcgcagcgctttatccggtcaaaaaagagacactgcttgatgcgaaacaatttgctgcattcctgcgtgagcaaagcatcacaactatgtggctgacatcacctttattcaaccagcttgctgcaaaggatgcgggtatgttcggcacactgcgccatttaatcatcggcggagatgcccttgtcccgcatattgtcagcaaagtaaaacaggcatcgccgtcgctttcattgtggaacggatacggcccgacagaaaacacgacgttttcaaccagttttctgatcgaccgcgagtatggcggctctatcccaatcgggaagccgatcggaaattccactgcctatattatggatgagcagcaatgcctgcagccaatcggcgcgcctggtgagctttgcgtaggcggaatcggtgtagcgcgtgggtatgtcaatctccctgagctgacggagaagcaatttctggaagacccgttcagaccgggtgagagaatttaccgcactggtgacttggcaagatggctgccggacggcaatatcgaatttttaggcagaatcgacaaccaagtgaaggtgcgcggcttccgaattgagcttggcgaaattgaaacaaaactgaacatggctgagcatgtgacagaagccgcggtgatcatccgcaagaacaaagcagacgaaaatgaaatttgcgcgtacttcacggcggatcgtgaagtggctgtgagtgagctgagaaaaacactgtctcagtctttgcctgactatatggtccctgcccacctgattcaaatggacagcctgccgctcacgccaaacgggaaaatcaacaaaaaggaactgcctgcaccgcaatcagaagccgtgcagccggaatacgcagcaccaaaaacagagagtgaaaagaaattagcggagatctgggaaggaatactcggcgtcaaagcaggcgttaccgataacttctttatgatcggcggccattctttgaaagcgatgatgatgacggcgaaaattcaagagcattttcataaggaagttccgataaaagtgctttttgaaaagccgactattcaagaactggcactgtatttggaagagaacgaaagcaaggaggagcagacgtttgaaccgatcaggcaagcatcttatcagcagcattatcctgtatccccggcccagcggagaatgtatatcctcaatcagcttggacaagcaaacacaagctacaacgtccccgctgtacttctgctggagggagaagtagataaagaccggcttgaaaacgcgattcagcaattaatcaaccggcacgaaatcctccgtacatcgtttgacatgatcgacggagaggttgtgcaaaccgttcataaaaacatatcgttccagctggaggctgccaagggacgggaagaagacgcggaagagataatcaaagcatttgttcagccgtttgaattaaactgcgcgccgctcgtccgttcgaagcttgtccagctggaagaaaaacgccacctactgctcattgatatgcatcatattattactgacggcagttcaacaggcattctaatcggtgatcttgccaaaatatatcaaggcgctgatctggaactgctacaaattcactataaagattacgcagtttggcacaaagaacaaactaattatcaaaaagatgaggaatactggctcgatgtctttaaaggcgaactgccaatactggatcttcccgcggatttcgagcggccagctgaacggagctttgcgggagagcgcgtgatgtttgggcttgataagcaaatcacggctcaaatcaaatcgctcatggcagaaacagatacgacgatgtacatgtttttgctggcggcgttcaatgtactcctttccaagtacgcgtcacaggatgatatcattgttggctcgccgacagctggcagaacacatcctgatctgcaaggtgtgccgggtatgtttgtcaacacggtggcactcagaacggcaccagcgggagataaaaccttcgcgcaattccttgaagaggtcaaaacagccagccttcaagcattcgagcaccagagctatccgcttgaggagctgattgaaaagcttccgcttacaagggatacaagcagaagtccgctgttcagcgtgatgttcaacatgcagaatatggagattccttcattaagattaggagatttgaagatttcctcgtattccatgcttcatcatgttgcgaaatttgatctttccttggaagcggtcgagcgtgaagaggatatcggcctaagctttgactatgcgactgccttgtttaaggacgagacgatccgccgctggagccgccactttgtcaatatcatcaaagcggccgcggctaatccgaacgttcggctgtctgatgtagatctgctttcatctgcagaaacggctgctttgctagaagaaagacatatgactcaaattaccgaagcaacctttgcagctctttttgaaaaacaggcccagcaaacacctgaccaccctgcggtgaaggctggcggaaatctgctgacctatcgcgagcttgatgaacaggcgaaccagctagcgcatcatcttcgtgcccaaggggccggaaatgaagacattgtcgcgattgttatggaccggtcagctgaagtcatggtatccattctcggtgtcatgaaggcgggggcagctttccttccgattgatcctgatacacccgaagaacgaatccgttattcattagaggacagcggagcaaaatttgcggtcgtgaatgaaagaaacatgacggctattgggcaatatgaagggacaatcgtcagccttgatgacggtaaatggagaaatgaaagcaaggagcgcccatcatccatttccgggtctcgcaatcttgcatacgtcatttatacgtccggtacgaccggaaagccaaagggcgtgcagattgagcatcgcaatctgacaaactatgtctcttggtttagtgaagaggcgagcctgacggaaaatgataagactgtattgctttcatcttacgcatttgaccttggctatacgagcatgttccccgtacttctgggcgggggcgagctccatatcgtccagaaggaaacctatacggcgccggatgaaatagcgcactatatcaaggagcatgggatcacttatatcaaactgacaccgtctctcttccatacaatagtgaacaccgccagttttgcaaaagatgcgaaatttgaatccttgcgcttgatcgtcttgggaggagaaaaaatcatcccgactgatgttctcgccttccgtaagatgtatggacataccgaatttatcaatcactacggcccgacagaagcaacgatcggcgccatcgccgggcgggttgatctgtctgagccggatgcatttgcgaaacgcccgacaatcggacgcccgattgcgaatgccggcgcgcttgtcttaaatgaagcattgaagcttgtgccgccgggagcgagcggacagctctatatcacgggacaggggcttgcgagagggtatctcaacaggcctcagctgacagccgagagatttgtagaaaatccatattcgccgggaagcctcatgtacaaaaccggagatgtcgtacgaagactttctgacggtacgcttgcatttatcggccgggctgatgatcaggtgaaaatccgcggctaccgcattgagccgaaagaaattgaaacggtcatgctcagcctcagcggaattcaagaagcggttgtactagcggtttccgagggcggtcttcaagagctttgcgcgtattatacgtcggatcaagctattgaaaaagcagagctccggaagcagctttccctaacactgccgtctcatatgattcctgctttctttgtgcaggttgacgcgattccgctgacggcaaacggaaaaaccgacagaaacgctttgccaaagccgaacgcggcacaatccggtggcaaagccttggccgcaccggagacagcgcttgaagaaagcttatgccgcatttggcagaaaacgcttggcatagaagccatcggcattgacgacaattttttcgatttaggcggccattcattaaaagggatgatgctgattgccaacattcaggcggaattggagaaaagcgtaccgcttaaagcactgttcgagcagccgactgttcgccagctggcggcttatatggaggcgtctgctgtttcaggcggccatcaagtcctcaaaccggctgacaagcaggatatgtatccattgtcatccgcacagaaacggatgtacgtgctcaatcagcttgaccgccagacgataagctacaacatgccatctgttcttctaatggaaggagagcttgatatttcgtgcctgcgcgattcactcaatcagcttgtgaaccgtcacgaatcattgcggacgtcatttatggaagctaatggtgagcctgttcagcgcatcattgagaaggcggaggttgatcttcatgtgtttgaagccaaagaagacgaagcggaccaaaagattaaggaatttatccggccattcgacttaaacgacgcaccgctcattcgcgcagctttgcttcgaatagaagcgaaaaaacatttgctgcttttagatatgcatcatatcatcgcagacggcgtctcaagaggcatttttgtaaaagaattggcgctgctttacaaaggagagcagcttccggagccggcgcttcattataaagatttcgccgtttggcaacatgaagctgagcaaaaagaacggatgaaggagcatgaggcgtactggatgtcagttctttcaggcgagctgccagagcttgatctcccgctcgattacgcccgtccgcctgtgcaaagctttaaaggagatacgatccgtttccgtacgggaagtgagacggcaaaggcggtagaaaaactgcttgcggaaaccggaacgaccttgcacatggtgctccatgctgttttccacgtctttttaagcaaaatttccggacagcgggatatcgtcatcggctccgttactgccggccggacgaatgctgatgttcaggacatgccgggaatgttcgtcaatacacttgccctgagaatggaagcgaaagaacagcaaacatttgcggagcttttggagcaagcaaagcagacgaacctgtcagcgcttgagcatcaggagtatccgtttgaagatctggttaatcagcttgatctccctcgggatatgagccgaaacccattgtttaatgtgatggtgacgacagaaaaccctgataaagaacagcttacattgcaaaatctgagcatttcaccttatgaggctcatcagggaacttctaagtttgatctgacactgggcggatttactgatgaaaatggcattggcttgcagctcgaatatgcgacagatctgttcgcgaaagaaacagctgaaaaatggagcgaatacgttctgcggctactaaaggctgttgcggataacccgaaccagccgctttccagcctgtcactggtcaccgagacagaaaaacaagcacttcttgaggcatggaagggcaaagcgctgcctgtgccgacagacaaaacggttcatcagctattcgaagagactgtccagcgccacaaagaccgcccggctgtcacatacaacggccagtcttggacgtacggtgagctgaatgcgaaggcgaatcgtctcgcgcggattctgatggactgcggcatcagcccggatgaccgcgtcggcattctcacgaagccgtcgcttgaaatgtccgccgcggtgctcggcgtcttgaaagccggagcggcgtttgtgccgattgatcctgactacccggatcagcggattgagtatattttacaggacagcggcgcgaagcttctcttgaaacaggaaggcatttcagtgccggacagctttacgggagatgtcattcttctcgacggaagccgcacgattctaagcctgccgcttgatgaaaacgacgagggaaatccagaaaccgctgtaaccgcggagaacttggcgtacatgatttacacgtctggaacgaccggacagccgaagggtgtcatggttgagcaccatgcgcttgtgaacctgtgcttctggcaccacgacgcgttcagcatgacagcggaggaccgcagtgcgaagtacgcgggctttgggttcgacgcttccatttgggagatgttcccgacttggacgatcggcgctgagcttcacgtcattgatgaagcgatccgcctcgatatcgtccgcctgaacgattattttgaaacgaacggcgtaacgatcacgttcctgccgacacagcttgcggaacagttcatggagcttgagaacacatcacttcgcgtcctcttgaccggaggagacaagctgaagcgcgcagtgaaaaagccgtacacactcgtcaataactacgggccgacagaaaatacggtcgttgccacaagcgcagaaatccatccggaggaaggctcgctttccatcggaagggccattgccaatacgagagtatacattctcggcgagggcaatcaggtgcagccggaaggcgtagccggagagctttgcgtggcggggcgcggactggcacgaggctatctgaatcgagaagacgaaaccgcgaagcggtttgtcgctgatccgtttgtgccgggtgagcgcatgtaccgcaccggcgatttggtgaaatggacgggcagcggcatcgaatacatcggccggatcgaccagcaggtcaaggtccgcggctaccggatcgagctttcagaaattgaagtccagctcgcccagctttctgaggtgcaggatgcggcggtgacagctgtcaaggataaaggcggcaatacagcaatcgcggcgtatgtcacaccggaaacagctgacatagaagcactaaaatcagcactaaaggaaaccctgccggattacatgatcccggcgttctgggtgacgctgaacgagcttccggttacggcaaacggcaaagtggaccgcaaagccttgcctgagccggacatcgaagcgggaagcggagaatacaaagcgccgacgaccgacatggaagagctgcttgccggcatctggcaggacgtgcttggaatgtctgaagtcggtgtcaccgacaatttcttctcgcttggcggagattccatcaaaggaattcaaatggcgagccgcttgaatcagcacggctggaggctggaaatgaaagatctcttccagcatccgacgatcgaagagcttacccaatatgtagagcgtgccgaaggcaaacaggcagaccaaggcccggtagagggcgaagtcatcctgacgccgatccagcgctggttctttgaaaagaacttcacgaacaagcaccactggaaccaatcggtgatgcttcacgccgcgaagggctttgaccctgaacgggtggagaaaacattgcaggcgctgatcgagcatcatgacgcgctccgcatggtctaccgcgaggaaaacggggacatcgttcaggtgtataaaccgatcggtgagagcaaggtcagcttcgaaatcgtggatctgtacggctccgatgaagagatgctgagaagccagattaagcttctcgcgaacaagctgcaaagcagtctcgatctgcgaaacgggccgcttttaaaggcggagcaatatcgcacagaagctggggatcacctgctcattgctgtacaccatctcgtggtcgacggtgtgtcatggcggattttgcttgaagactttgcttcaggctacatgcaggctgagaaagaagagagccttgtcttcccgcaaaaaacaaactccttcaaggattgggcggaagaactggcggcattcagccaatcagcgcatcttttacagcaggctgaatactggtcgcaaattgccgctgaacaggtttctcctttaccaaaggattgtgaaacagagcagcggatcgtcaaggatacatcatccgtcctatgtgaattaacggaagaagacactaagcatcttttaacagatgttcatcagccatatggaactgaaatcaacgatattcttctcagcgcgctcggtttgacaatgaaagaatggacaaagggggccaaaattggcattaaccttgagggacacggccgggaggacatcatcccgaatgtgaatatctccagaacggtcggctggtttacggcacaataccctgttgtgctcgacatgtctgaagcagatgcctcagctgtgatcaaaacagtcaaagaaaacctgcgccgcattccggacaaaggtgttggctacggcattcttcgttatttcacagaaacagcggaaacaaagggcttcacaccggagatcagcttcaactatttgggccaattcgacagtgaagtcaaaaccgatttctttgaaccgtccgctttcgatatggggcgccaagtaagcggagaatcagaggcgctgtacgcattaagcttcagcggcatgatcagaaacggccggtttgtgctttcctgctcctacaatgagaaggagtttgaaagagctacagtcgaggagcaaatggaacggtttaaagaaaacctcctgatgctaatccgccattgcacggaaaaagaagacaaggaattcacaccaagcgacttcagcgccgaagaccttgaaatggacgagatgggagatatctttgacatgcttgaggagaatttaaaataaaacgcaagggaattacagaaggcgggagcgaaacatatgagtcaatttagcaaggatcaggttcaagatatgtattacctatcgccgatgcaggaagggatgctttttcatgccatcctgaatcccggccaaagcttttaccttgaacaaatcacgatgaaagtaaaaggtagcttgaatatcaaatgtcttgaagaaagcatgaatgtgatcatggaccggtacgatgtatttcgtaccgtgttcattcacgaaaaagtaaaaaggcctgtccaagtcgtattgaaaaaacggcagttccaaatagaagaaatcgatctgacacacttaacgggcagcgagcaaacagccaaaatcaatgagtacaaagaacaggataagatcaggggttttgatttgacgcgggatattccgatgcgggcagccattttcaagaaagctgaagaaagctttgaatgggtgtggagctaccaccacattattttggacggatggtgcttcggcatcgtcgtacaggatctatttaaggtatacaatgctctgcgcgaacaaaagccgtacagcctgcccccgtcaaaccgtataaagactacatcaagtggcttgaaaagcaggataaacaagcatcactgcgttactggcgcgagtatttagaggactttgaaggacaaacgacgtttgcggagcaaagaaagaaacaaaaggacggctatgagccgaaagagctgctcttttcactgccggaggcggaaacaaaggcctttaccgagcttgcaaaatcgcagcataccactttaagtacggcgctgcaggcagtctggagcgtattgatcagccgctatcagcagtctggcgatttggccttcggtacagttgtttcagggcgtcccgcggaaatcaaaggcgttgaacatatggtcgggctgtttatcaacgttgtcccgagacgtgtgaagctgtctgagggtatcacatttaacggcttgctcaagcagctgcaggagcaatcgctgcagtctgagccgcaccaatatgtgccgctttatgacatccaaagccaggccgatcagccgaaactgattgaccacatcattgtttttgagaactatccgcttcaggatgcgaaaaatgaagaaagcagtgaaaacggctttgatatggtggatgttcatgtttttgagaagtcgaattatgatctcaacctgatggcttcccctggagatgagatgctgattaagcttgcctataatgagaatgtgtttgatgaggcgtttatcctgcgcttgaaatctcagcttctcacagcaattcagcagctcatccagaatcctgatcagcctgtcagcacgatcaacctcgttgacgacagggagagagaatttttgctaaccggcttaaacccgccggctcaagctcatgaaacaaagcctctgacggattggttcaaggaagcagtgaacgtcaatccggatgcgccggcgcttacgtattccggccagaccctgtcttatcgcgaattagatgaggaagcgaaccgccttgcacgccggctgcaaaaacacggtgcgggcaaaggctctgttgtagcgctgtacacgaagcgctcacttgaactggtaatcggcattctcggtgtattaaaggcgggagcagcctatctgccggttgatccgaagctgccagaggaccgaatctcgtatatgctggctgacagtgcggcagcctgtcttctgacgcatcagaagatgaaagaacaagcggctgagctgccgtatacaggcacaacgctcttcattgatgatcaaacacggtttgaagaacaggcaagcgatcctgcaaccgcgattgatcctaatgatccggcatatatcatgtacacgtccggcacaaccggaaagccaaagggcaatatcaccactcatgccaatattcaaggattggtcaagcatgtagactacatggcattctctgagaaagatacattcttatctgtttccaattacgcctttgacgcatttacctttgatttctatgcttctatgctgaatgcggcacggctcattatcgcagatgaacatacgctgcttgatacagaacggctcacagatctgatcctgcaagagaatgtcaatgtcatgtttgcgacaaccgcactatttaatcttctcacggatgcgggagaggattggatgaagggactacgctgtatattattcggcggagagcgcgcgtcagtgcctcatgtcagaaaagcgctgcgggtcatggggccgggcaagctgattaactgctacgggccgactgagggaacagtgtttgcgactgctcacgtcgtgcatgatataccggattccatctcctcattgccgatcggaaagccgatcagcaatgccagtgtttatattctgaacgagcaaagccagctccagccattcggggcgatcggtgaactgtgcatcagcggaatgggcgtgtcaaaaggatatgtaaatcgtgctgacctcacgaaggaaaagtttattaagaacccgttcaagccgggagaaacgctttaccgcacaggggatttagcgcgctggctgccggatggaacgattgaatacgccggccgtattgacgaccaggtcaaaatacgtggacaccggattgagcttgaagaaatcgaaaagcagctgcaggaatacccaggtgtgaaagatgcggtcgttgtggcggaccgccctgagtctggcgatgcatcaatcaatgcctaccttgtgaaccgaacgcagctttcagctgaagacgtgaaggcgcacctgaaaaaacagcttcctgcttacatggtgccgcaaacctttaccttcttggatgagcttcctttaacgacgaacgggaaagtcaataaacggctgctcccaaaacctgatcaggatcagctggcggaagaatggattggaccgcggaacgagatggaagaaacaatcgcacaaatatggtctgaggttctcggcagaaagcaaattggcattcatgacgatttctttgcgctcggagggcattccttgaaggccatgaccgccgcgtcccgcatcaagaaagagctcgggattgatcttccagtaaagcttttgtttgaagcgccgacgatcgccggcatttcagcgtatttgaaaaacgggggccctgatggcttgcaggatgtaacgataatgaatcaggatcaggagcagatcattttcgcattcccgccggtcttgggctatggccttatgtaccaaaatctgtccagccgcttgccgtcatacaagctgtgcgcctttgattttattgaggaggaagaccggcttgaccgctatgcggatttgatccagaagctgcagccggaagggcctttaacattgtttgggtattcagcgggatgcagcctggcgtttgaagctgcgaaaaagcttgaggaacaaggccgtattgttcagcggatcatcatggtcgattcctataaaaaacaaggtgtcagtgatctggacggacgcacggttgaaagtgatgtcgaagcgttgatgaatgtcaatcgggacaatgaagcgctcaacagcgaagccgtcaaacaaggcctcaagcaaaaaacacatgccttttactcatactacgtcaatctgatcagcacaggccaggtgaaagcagatattgatctgctgacttccggcgctgattttgacatgccggaatggcttgcatcatgggaagaagctacaacaggtgcttaccgtatgaaaagaggcttcggaacacacgcagaaatgctgcagggcgaaacgctagataggaatgccgggattttgctcgaatttcttaatacacaaaccgtaacggtttcataaatgaagtgatgaaaggaggagacagccaatgagccaactcttcaaatcatttgatgcgtcggaaaaaacacagctcatctgttttccgtttgccggcggctattcggcgtcgtttcgccctctccatgcttttttgcagggggagtgcgagatgctcgctgccgagccgccgggacacggcacgaatcaaacgtcagccattgaggatctcgaagagctgacggatttgtacaagcaagaactgaaccttcgccctgatcggccgtttgtgctgttcggacacagtatgggcggaatgatcaccttcaggctggcacaaaagcttgagcgtgaaggcatctttccgcaggcggttatcatttctgcaatccagccgcctcatattcagcggaagaaagtgtcccacctgcctgatgatcagtttctcgatcatattatccaattaggcggaatgcccgcagagcttgttgaaaataaggaggtcatgtcctttttcctgccttctttccgatcagattaccgggctcttgaacaatttgagctttacgatctggcccagattcagtcgcctgttcatgtctttaacgggcttgatgataaaaaatgcatacgagatgcggaaggctggaagaagtgggcaaaagacatcacattccatcaatttgacggcgggcacatgttcctgctgtcacaaacggaagaagtcgcagaacggatttttgcgatcttgaatcagcatccgatcattcaaccgtgatcaaaagcggacagcttcggctgttccgctttttttgtgttgaatgccaatttttgcatggtataatagtcgaaatactcaaataaaggcaggtcgaaacatgcgcacgtctcccaggatgaaatggtttgtattgctgtttacgtttgttttcgccatcggaatgaactcattcagaaattcctttcaattttttatgctgccaatggcagatgccttccatgccgacaggtcgctgatctcggtttctgtcagcatttttatgatcacaaccggcatcgtccagttttttgtcggtttttttatcgaccgtttcagtgtcagaaaaattatggcgctgggagctgtctgcatcagcgcaagctttttggtgcttccttattcaccgaatgttcatgtgttttccgccatttacggtgtgcttggcggaatcggctattcctgcgcggtcggcgtgacgacccagtacttcatcagccgttggtttgacacacataaaggtctggcgcttgctattttgaccaatgccaactctgcgggcctgctgcttctctcgcccatttgggctgcggctccgtatcatgccggctggcagagcacctataccattttgggaatcgtcatggcggctgttctgctgccgctcctcgtctttgggatgaagcacccgccacatgcgcaagcggaaactgtgaaaaaatcttatgattggcgagggttttggaacgtgatgaagcaatcccgcctcattcatatcctgtacttcggcgtgtttacttgcggatttacaatgggaattattgatgctcacctcgtcccgatactgaaggatgcgcatgtctctcatgtcaacggaatgatggccgcgttcggggcatttatcatcattggcggattattggcgggctggctgtcagatctcctcggcagcagaagcgtcatgctatccatcttatttttcattcggctgctcagcctcatttgcctgctcattcccattctcggaattcatcacagcgacctttggtacttcgggtttatcctgttattcgggctcagttacacaggcgtgatcccgctgaccgcggcgtcaatttcggaaagctatcaaacaggattgatcggatcgctgttaggcatcaatttctttatccatcaggttgccggagctcttagcgtgtatgcgggcggtttgttttttgacatgactcatggttatttgctgattgtcgctgtgtgcatcgtgtttgtgggtttatcggctgtaatagagctggtgccgtttttagataaacagaaggcaaaagaaacccaccattcaatataaaaggatcagcactgtcaatgctgatcctttttaaatttgagtttttttgtttcggtatttttaaggataatctccttgaatctgttcatctcctcttcggagtgaaaaaaatgtttggggatcgcaatatattggccacttgatgtattgaccctgaagatatttttatattcgaaaacagctgtaatttcatcccaattgaaaatgaggtcatattttttagaacatatacgaattccttcttggttcagagtatatgttcttttagatttcatccgttcgttcttcttgtatgctctggaaaacttcacatatagaagaaggaggagcagcagtgtaaacagaacggacatcacgataatcaacatactgttcataaacaagttaagcgcgtcactgccataaacgatacggggccatccgttaatgaagttaactgcagcaaatatggtgcaaaacaacagaaagtaaaagcatgatatttttgcgatttgataaaaaaagatttctcttacatccttaaaagcgatttctcctggaagattgatactttcactagcatattgaatcatacggtaaacctacacctctaaccatgtttttcctttcagtctagcataatttctcatttttttgcaggcataccagggcgctttgtttttttctccagattgatattgctccccaccacgccaatcataatacaaacagccccggcaagatgataccaggccaggctttcgttgagaatcataactcctgcaatcatcgtcacaatggtagatacatgattaaaagcactcattttaaacgcctcaattcgcgacagcgtatagttagacagaaatgaagtgacaagtgaagacagcacgcccaaatacacaatggcgagaacgaagccgggctcccggaacggcagaaaataagtgccgactgttcccgccgctccgtgacgcacaagggcgatggcgttgaagacgacaaagccgatggctgacatgatgtaggtgagctcggtcagcttgaaccgctgcgtcatttttctggcagcagtattgtacatcgctgaggacaaagcggacaataggatcagcaaagacccttttaagctggctgattccacgtcaacgcctttcatcacaaaaataaacatgacgccggcaacggataaaaccgtgaaccccttttgggtccacgttgggcgttcctttaaaacataagcggcaaagaccatcgtgaaaatcggaatggctgcctgaataattcccgcttcagaggaggacgagtacacaaggccaaatgcctgaaagctgaaaaataacgcgggatacagcagggcgagcggcaaaatggcaatgacgtcctttacgcggattgatagctttacccagccgaataagatcggtacagtggccgcagcaaacgcaatggtgaaccgatgcgccaaaatatcaaacggctctgctgtttgcagtgcgatttttacgaatagaaaggataaaccgataatgaacgaatataaaatagccgctatataagcgggggcttgctgatgtttaaccataatgggaatggctcctttacctgaattgcagcgccggtcgctccctttattgtatggccgcggtcagaacggtacaatgagaaaaacaatgaactgtaccggtacaaaacagggggagaaggcatggagaaatatatgagtctattaacgaagatagaggagatgatgcaaagcaccgcctatcaagaaggagacaggcttccatctatccgtcagctgtccgcccgctaccaagtcagcaaaagcacagtgatccgcgcgctgcaggagctggaaaaacgccaccttatctattccgttccgaaaagcggctattatattgtgaaaaagacgggaaaagccaaaagcgggcagcagggtcccattgactttgccacatctgcgccggatccagatgtgtttccgtatcttgattttcagcactgcatcaacaaagcgattgatacatacaaaaacgatttgtttatttatgggacgccaaaggggcttccatcactcatccgcgtactccgaaagctcttggccactcaacaggtatttgcggatgaacggcatattttcattacatcaggtgtccagcaggcgttatccttgctttgtgccatgccgttcccaaatgggaaagagaagatcgccattgaacagccgggctaccatttgatggtcgaacagcttgagacgcttgggattcccgccatcggggtgaaacgaacggaagaagggcttgatatagccgaggttgagcggttatttcaaacagaatcgattaaatttttttatacgatgccccgcttccataacccgcttggctgctctttgtcagagcgtgataaacaggagcttgtgagactggcagaagcgtatgatgtctacctcgttgaggatgattacctcggtgatctggaggaaaataaaaaggcagatccgctgtacgcatatgatctgtcctcacatgtcatctatttgaaaagcttctcgaaaatgatgttccccggccttcgcgtgggggcggctgttttgcccgaagcgctgactgacacgttctatgcgtacaaaaagctgaacgacatcgactgttcgatgatttctcaagcggcattggagatttacctgaaaagcggtatgtacggcaggcataaggagaaaatcagaaattcttataaagagcggtcgctgaggctacatcaagccattcaaacacacaggcagctgggaagcggacgctttacgttctccagcgggcaggcaccctgtatgcacacccatctggtgcttcctcaggatctgcccgcctcaagagtgattcatagactggaaaaacaaggggttctccttgtggcgatagaccgtcattatttatcagattatccgaaagaaaatctattaaaaatcaatatttccaatgtgaaaacggaagatattgagcgcggtgtcaagctgttgatgagccatttataaaagctcttcgtacgagaccattgtgatatcctcggggaaatcagggtgtgcggcgcatacagccattttgtagccgggatcgacctcatacgttttgatatagcatggggaatggctgtccggaagctcaatggatacttgtccgtcctggtgcaggcgcactgaaaaggaatcaagcggaagcgataagcctttgccttcctgtttgataaagctttctttcattgaccatagatgataaaaatagtctgtctgctcgtccttgtcttttgctaaaaggtcgctgtactctgtttttgaaaagaagcgcttggcgatctcaaggctgatcggtttcgttttttcgatatctatgccgatcggctgtgaatcaaacgcgcaaatgacccagcgtccggagtgagaaatgttgaaatgagcgtcgggaagatcagggatgcacggcttcccgtattcctgcgtgctaaagcggatatcggatttgtccaactgatactgcctgcttatgactgagcgaacgagcacatctcccagcagggtgcggtgagcatcttctttatgataaaatctccggcatttctcccgtttttcaggtgctatgaaagacatgaaccgttcattttcttcctgtgaaagcgggcggtccatataaattccgtaaatcttcattctagatcctccgtctgcaaaagattgtcaaaaccatcctatcatacttccacaagactcatatagaggagaaaataaaaaaacaaagccaaggcggctttgttttagtggacaggcggagatgctttcacagcggctgtccgccttgccacagcataattcagcagctggattgactgcggcaatgaaaaacgcagaatgagcccggtgaggatggcggtcaaaatggtgccaaaaccgatcggcccacccatgccccatgccgcaaacaaaatggttaattccatgccgttccgcacccattgcacattccagccggttttttctgtaatcagcatcatcagtgaatcacgcggccccgcgccaaggcctgctgatacataaacaccgacgccgtaaccgatcagcaccacgccgagagagaagacgatgatcgagcctgtgtaggtcgagggggcaggcagaatgaaattgaaaaaatctataaatacaccaatgagcaccatattcaggagggccccaattttcggccaagctctcgtaaacaatgacgtgaatccgacgatgagcgctccaataatgatggaccactggccgacggtaagcccgaagtgctgaaacaggctgtaatgaaatgcatcccacggactaatgccgagtgcttttccttctatcgtcagggatacaccaaaagccaaaatgatcaaaccggcaaaataaaatgtccagcgcagaacaagttcttgcttcacgtgaggtcccttctttcgtaaaaatcagtcgattgtcattgtagcacatctgacagaagggcggaataggcgaaaggggctcaacaaaaaaacagggccgccgcaggcgccctgtttcagcgtgttggtaaacccttgcattcgttgtcaggcctgtgcttcggtgctcacgaatttaacattcgctgtgctccaatgctcgcccttcctagacttcaaaggttttcaatcacgctgaaaatcacaaaatcctaaaacgaatatcgttttaggattttgtcaataatctgaaacagggcgcgggcgccctgtttttcttattacagcgggttcaaaatccggttcaagaaccgctgtgtccgttcttcttttggtgcggagaaaatttgctccggcggtccttgctccacgataacgccgccgtcgatgaagatgacttcatccgcaacctcctgcgcgaacttgatttcgtgggtcacgacgaccatggtccagccttcattggccaagtccttgataaccttcagcacctctccgacaagctcgggatcaagcgctgaggtcggttcgtcaaacagcatgagctcaggctgaatcgccagtgcgcgggcgatgccgacgcgctgctgctgtccgccggaaagctggaacggatataaatccattttgtccttcaatccgactttatcaagaagctgaatcgcttcttttctgacttcctctttgttccgtttttgcacctgaacagggccctccatcacgttttcgagggctgtgcggtgcgggaacaggtgatacgcctgaaacaccattccggattttcggcgaagctttaggatatccgcctgtttcacctttttggagaaatcgatggagaaatcatcaaatgcaagctctccgcgattcgggatctccagagcgttcaggcagcggagcagcgtcgttttccctgaacctgaaggcccaagtatggcgatgacttttcctttttcaatcttcatatctatcttttttaaaatttcattttcaccgaatgatttgtttaatcctttaacggtaagcatactcggaacctccttatttggccacgtagcggtcaagacgccgttcgatgacatgctggacgagtgagagcaggaagcagataatccaataaataaaggctgcttcaatatagatcactaaaatttgatcaagattccgcgcgccgatttcctgggcttttctgaacagctcagcgaccagaatttgagaggcgagggatgtatctttaatcaggctgataaaggtattggataatggcgggatcgacacacgaaacgcctgcggcaaaatgacgcggaacagcgttttttgatgtgtcatgccaattgtgtagccggcttcccattgccctttcggcacggataaaatagatgctcgaatgatttcagatgcataggcgccgacgtttaatgaaaaggcgataactgcgcttggaaatggatctaatgtgacgttaaaggccgggaacagatagaaaatgatgaacaattgaacgagaagaggagtgccgcgtattgcggatacgtatacgctgaacacccatctcaaaggtctcactttcgacattctggcaagcgccgtaatcagcgccaggatcattccgaatataaaggaaagaatcgtaaggggaatcgtatagtagattccccctgaaagtatcggccagaatgactgctgcaccagatcccacgggatcgccgtgccaagcgtcaatgccggcagattatttagaaacatcttcgccgaaccattttttagaaattttagaaagagtcccgtcctctttcatttcttttaatgctttgttgacttgatcaacaacctcgccgcttcctttacggaacgtgaaatatgttgactgaggctcacctgtttcaaacgcgattttcacgtttttattgccagatgtttttaagtagttcaatacggcaagcttatcgttgtatgtcatatcgacgcggccttgctggatcatttgaagggcctgcgccataccttcaacgccttctactttagcgccggcatttgtagctaatttgttgtagttgcttgtcagtgattgagctgacgtttttccttttacatctgcttcagacttaatatcgttgttgtcttttttcgttacgacaacggctcttgatgttgtgtatttatctgagaaatcatattgattttcacgatctgtttttccgacttggttggcaacaacgtcaaaccgtttggaattcaggccggcaaacatactgtcccactgtgtttccttaaagtcgactttaagcccgaggcgttttgcgacttctgtgataacttcgacatcatagccagtcagtttatcagtgtctttgtcgtggtaagtgaacggctcatatgttccttccgttccgactgtgagcacaccttttttcttaattgaagcccaaagatcgccatctttggcattatcttttgactgattgtcatttcctgctccgcaagctgcaagagctgcaatacttacgaccatgaataaagccaataatgcttttttcatcttattccccacttttctggttgattttattgaaataaaaaaatagcttacaaatctaaaggataacttttttttagtatgagtcaagtaattggttttcataaggcaaaatcttttaaaataaatccaaaaattgctgtgccggtttaggcaaataactgtccgttctccacatgacagccggtgtcataatgaagggattattttcgatatgaacggtgcgaacgtgatttctcatatgaacgggaatcattgtgacgggcaaaatagacgcgccgaatccggatgacacgaggctgagcaaagttgcagagtcgtggcattcacaaacaatgcgcggctccaggttcaaacgatgaaattcattcatgacctgattataaacgccttttccgttgacaggccgcagcaggatcagcggaaatgaaggaatgtcctccatcttaatggtgtctccgcacggatatccggcttcatctgaaagcacgagcacacatggaatgtcatcaagctgtttgaattgtactgtgtcacttttgatcagtgttgtcgtgaccgccgcatcgatttgccggctttccagcagctccaacagtgtcgcgggttcattttcccaaatattaaaggtgagatgggggtatctctctttgatctgtgttactttttcaagcatcagagccgcgcaataaatcgttgatcccacggcaagtgtgccggctacttcctccttcagctcctgtacctcaatgactgcatcttcaaacctatgcagaatctcttttgctctttttagaaaaacagctccttcatatgtaagagtcatttgttttttcttgttacggtcaaacagaacaacaccaagttcgtcctccagctgtttgagctgcctgcttaaaggcggctgcgccatgtgaagctttttggctgcggacgtaattttctgttcttgggcaatggtaatgaagtatcgaagctggcgaatatccaaaagaaagcgcctccttatcataccttttaggtattaaatatagatttaatagatatttttcatatggatatatcaggagtatgattgaaatgaaagcagaattcaagcgtaaaggagggggcaaagtgaaactcgttgtcggaatgacaggggcaacaggggccattttcggggtcaggctgctacagtggctgaaggccgccggagtggaaacccatctcgttgtgtctccttgggcaaacgtcacgatcaaacacgaaacaggctataccttacaagaagtagaacaactggccacatacacttactcacataaggatcaggcggcagccatttcaagcgggtcgtttgataccgatggaatgattgttgcgccgtgcagcatgaagtctctcgcaagcattcgcaccggaatggcggataatctgctgacacgtgcggcggatgtcatgctcaaggagagaaaaaaactcgtcctcttaacgagagagacgcctttgaaccaaattcatctcgaaaatatgctagcgcttacgaaaatgggcaccatcattcttcctccgatgccggcattttataatcagccgagaagcttagaggaaatggttgaccatattgtttttagaacgttggaccaattcggcattcggcttcctgaagcgaagcgctggaatgggattgaaaaacaaaaaggaggagcttgatcatggcttatcaagatttcagagaatttctcgctgcccttgaaaaagaaggacagctgcttacagtgaatgaagaggtaaagccggaaccggatttaggggccgccgcacgggcagccagcaatcttggcgataaaagccctgcgctcttatttaacaacatttacggctatcataacgcgcgaattgcgatgaatgtcatcggctcttggccaaaccatgccatgatgctgggcatgccgaaagacacaccggtaaaagaacagttttttgaattcgcaaagcgttatgaccagtttccgatgccggtcaaacgtgaggaaacagcgccatttcatgaaaatgaaatcacagaagatatcaatttgttcgatatactgcctcttttcagaattaaccagggtgatggaggctactatttagacaaagcatgtgtcatttcccgtgatcttgaggaccctgacaacttcggcaaacaaaatgtcggcatttacagaatgcaggtcaaaggaaaagaccgtctcggcattcagcctgtcccgcagcacgatattgcaatccatctgcgccaagctgaagaacgcggcatcaatcttccggtcaccattgcgctcggctgtgagccggtcattacaacggcggcatcgactccgcttctctatgatcaatcagaatacgaaatggcaggcgcgattcaaggcgaaccatatcgcatcgtcaaatcaaagctgtctgatcttgatgttccgtggggcgctgaagtggtgcttgaaggtgagattattgccggagagcgcgaatatgaagggccgttcggtgaattcacaggccattattccggcggacgcagcatgccgattatcaaaattaaacgcgtctatcacagaaacaatccgatctttgaacatttatacttaggcatgccttggacagaatgcgattacatgatcggcattaacacatgcgtgccgctttatcagcagttaaaagaagcgtacccgaacgaaattgtggcagtgaacgccatgtacacacacggtttaatcgcgattgtttccacaaaaacccgctatggcgggtttgcgaaagcggtcggcatgcgcgcactcacaacgccgcacggactcggctactgcaaaatggtcattgtcgttgatgaggatgtcgatccattcaaccttccgcaggtcatgtgggcgctttcgaccaaaatgcatccgaaacacgatgcggtcatcattccggacttatctgtcctgccgcttgatccgggatccaatccatcaggaatcactcacaaaatgattcttgacgccactacaccggttgcgccggaaacaagaggccattattcacagccgcttgattcgccgctaacaacgaaagaatgggaacaaaaactaatggacttaatgaataaataaggaaaggatgttcgaaatgcatacatgtcctcgatgcgactcaaaaaagggagaagtcatgagcaaatcgcctgtagaaggcgcatgggaagtttatcagtgccaaacatgcttttttacatggagatcctgtgaaccggaaagcattacaaatcccgaaaaatacaatccagcgtttaaaattgatccaaaggaaacagaaacagcaattgaagttccggcggtgccggaacgaaaggcttgatccgcgtgaactgtatgtcagaccgcctctttgagctgcttgacgggagctgcctgaatgagaagcagcatgaggccttcgttctgcaaacagtatcagaggatggctggccgcatgccgctatgatcagtgcaggtgaaattatcgcgctgagccgaattgatatccgaatcgctctgtggaaaaacacaatgacttcggccaacatccttcgcacaggaaaagcacagttcacggcgtggtggaagggagcggcctattatgtaaagcttgaatgcgcgcctttaccgcctttgaatgatgctgaatatgatagagaccgtttttcctgccgcatcgtttcagtgaaggaggacgttgcgaaatacgctgatttgacttcaggtgtccgtatacagcttcacagccctgaagaggtgctgagcagatgggaaaagaccctggaagatttaaagcggtaatatcgatagcctgacgccatgcgtcaggctttttttatataatgaaaacaaaagggggcgtgagaaatggaacgtgcggggatcagtcactcggacggctttgatttagcttatcgaattgagggcgagggcgcacccatccttgtgatcgggagtgcggtttactatccgcgccttttttcctcagatatcaaacagaaatatcaatgggtctttgtcgaccataggggatttgctaagcctaagcgggagcttcgtgcggaggattcgaggcttgatgccgtcttggctgatatcgaaaggatgagaacatttcttcagcttgaggatgttactatcctgggacattccgggcacgcttttatggctttagagtatgccaggacatatcccaaacaagttcggaaggtggcgctctttaatactgcgcctgataacagtgaagaaagacagcgaaaaagcgaatcatttttcatggaaacagccagccttgagagaaagaaacgatttgaaaaagacatcgcgaatttgccgcaggacatcgacaaagatcctgaaaggcgcttcgtgcacatgtgtattcgcgctgaagcgaaaagcttttatcaagagcggccgcatgctgctgccttatgggacggtgtattcacgaatatgccgatcattgatgaattatggggcaatacatttgcccggattgatcttattcagcggttagctgatgttcgtatgccggtgtatattggattagggagatatgattatttggttgcgcccgttgcgctatgggatgcagttgacggtttatatccccatgtggataaggttatttttgaaaggagcggccatcagccgatgctggaagaaccggaagcctttgatcaaagcttcagcaaatggctggatcaataaaaaaacagcccgcagatcaaaatccgcgggctgtttctgattataagacccctttcatcgcgcgtttgataaccggcgagagcagcaggagaatgccgccaagaacgatagaaatcaaaccgatggtgccgaagtacattgtttcaggaattttatcaaacaatccggctacttgggcattgatcgcttgtgctgctgcgttcgtcagaaaccacatactcattgtctgtgcagagaaggcagctggtgccagtttcgttgtcacggataaaccgactggagacaggcacagctctccaagcacgacaagcaggaagctgagaacgagccaaagcgggcttacgagtgcttcttttccttgcatagcagggaataccataatgataaatgacaatccggctaaaataattccgattgagaatttaactggtgtagacggctggcgtttgccaagcttcatccagagccatgcgaatattggcgcaaaaatgacgacaaacaatggatttaatgattggaaccatgatgactgaagttcgaatccgcccaatgaaagtcttatgcgttcatcagcgtataccgcaagaatggtcgctccctgttcctgaatggcccagaacatgacagcaccgataaacaaaggaacgtaagcggcaagacgggatttttctgttttgtccgcttttttgcttgtaaacatgatgatgaaataaatcacaggaatcaaaataccgagaatacttacaaggtcgataaaacgattgatcgtcagcacgcctgtttgtacagagataatcactgcgatcgccacgatgataacaccgattccggtgccaatcgcagattttttagacagcggattcggcacattggaacctgcaagcccgaggtttttctttcttgtcaaagcaaaaacgataagtccgagaagcattccgaccgcggcagctccgaagccgagatgatagttgtacttctgtccgagtgttccgacaattaacggcgcaagtaaaccaccgaggttaatccccatgtagaaaatactgaaacctgagtcgcggcgcgggtcttctttcgtgtaaagatccccaaccacgcttgaaacgtttggttttaataagcctgttccgacaatgataagcaccatgctgatatagaatgcgatcgcgctgcccggataggcgagtgcaatgtggccgaacataatgaatatgccgccgtaaaacacggtgtttgcggtaccgaatacccggtcagcgagccatccgccaataatggtggacatgtatacgagtgatccgtaaatcgacataatggcaaccgcagtgcccttgtcaaagccgagccctccgtttaccgtctctgtatacaaatagtaaagtaagattgctctcattccatagtaagagaaacgctcccaaaattcggtgaaaaatagtgtaaatagtcctcgcgggtgaccaaagaaccctttttgcgggacgcttttaatgatactttcgttatcaatcgaagccatgtcagccaaaccctttctaaaaaaagtgtattataaaaatcatattcttatataatacttgtgtcaatataatttatactcatttcaaatagttccatattggaaaaattataaatacctaaaaatagtgatttcctcctaatttttaaactttttatcgtgagattttcttacacaactattcctttatatttttttaataaaattttagagaaatgtacaagcagatcgggcctttgtgagtaacatgatagtaatcatagagaaggaggctcgcaattggctgaattcatattaaatgcagcggatttcggtgttcctggagatggtaaaacggattcgacagaacggattaatcagtgcctcagtacagctgtatcgaaaggctatcatactgtctggtttccaaagggaacatatttaatagacgcaacgcttggcggagatcttaatcagaggtttcgaaacgcggggatcattgttcccggcaaccttgagattatgatggaccccgaatgtatcatgaaagtgatcccgaatagttcgtggggttattccgcattttatgtgggcaagcaagagaatataaccatttccgggggacaaattatcggcgaacgggatgagcatacgtatgcctcggcagggataaggtcaacccatgaatggggctttggcatatgtattgaaggatgctcgaatgttgtcattgatgatgtgaaaatttctgattttaccggcgatgggatcatagtcagcccaaggggattaaagaccaatcaagattatcgaacgtcagagcaaattatcatccgccgctgtgaggttcggcggtcgaggagaaataacatttccattaccggatgtgacatggtcacggtggaggaatgcttgattgaagatgccggaacggggaatggaacagcgccgaaattcggaattgacattgaaggatatggcgaaggtgatgttgattatgaggaaccgattaatgtatcaattcgcaataaccactttgttggaaacgtttcaagttctgtgaccaattttaacgggtatggcattttaatagaaggaaatcactctgacaatacaatcagctacggatatgggacgcaaacagtgatcaagggcaatattctgagacgccctgaagacgcggcggctgcgccaagagtcgggataaccggactcggtgtatcacaaggaaaagagaccagtgatgcagtgatcgctggcaacctcattaccggattttcaactggaattgatgtcagaggaaagagcgttcttgtgacgaacaacaaaatcagcaactttgaaaacacagggatattggtttatcagtcttccgatgtaaaggtagacggaaaccaaattcaaaacggactgtctgaaacaaggcgcagcatcggtcttcgcgcagtgctgtcagatgacatcgcttttctgaataactgtctcattcaagtcgttgacggtgtgaacgtttccggcggaaatatgatcattaaagataatctcctgagaaaattcagccggggcatttggattgctcaagggaacgcggtgattgaagggaatacactgaatcctgacgcgtttgaagcagtgccggaatcatattctgtttccgtcacaaacaatgccggcgccatcatcaaaaacaatacatttaaagagttcaaaaattaccccatttattgctccacaagtgcaaaaacctcaattatcggcaaccacttagagcgatccccgcttttggtcaccatctatatcagcgcaggtgtgcatgagatttttgataataccatttcagtcaacagaacagccgggaatccgattgtgatttatctcaatggctctgcaggctctatcatctctggaaacaccatcaataacctctccgcgggcactgcgacagctattcaaacaaacacgtcaaccaattccaaaatcatcggcaaccgcatttttaaagggaccatcaacaaacacagcagtgatacaatagacggcaatatgattgtctgaaaaaagcgcccccctttaggggttcttttttttcgatttatagatcacgtacatttctctcacaagtactaacacaaaaaataaaagcacgacccattccgcaaatgttgtcatcttaaagctggacatattgttataaacggcttttgttaaactgaacccttgaagcatgtccatcaacacagaaatagctaataaacaaattaatatgactccggtcacgcccaatatcttcatgcttcatcatcctccgcttttagtgtctatctttggcggagaagttataccgcatctaaccctaatgcataatctcaattttaaaaggaagaatatgagaaaacgacaaggaaaggtatttgtgtatgcctttattttctaagcgaaagaacaataccgattcaaaagacaagcagaatacagacgaaaggaatcaggaacagcagcaagaaaaagaaaggccggttctcatttctccaagtttggcaaagaatatagcggaaacgaaaaaggaagtcggaagcagctctgacgtcatcattcgcgagattaaaatcggggagcaggatcatgtccacctagctgttatctatattgctgggctggtcgataataacacgatccatgagtcgttaattgacccattggtacaggatgagtctatccagaatactcatgcgatccagcaaattcttgaaaaaacgctcccgctgggcggggtgaaagcggaaaagagctgggacaagcttttttccgagttaatgctcggcaatgcgctcatttttgctgatggccatgatgaagctttgatttgcagcactcaagggggagagcagcgctccatccaagagccgagcacccaggtgtcattccgcggcccgcgccaagggtttacagagtctctgcaaaccaatatttccatgatccggcgatacattaaaaatccgaatttatgggttgaaaaaatgaaaaaaggttctgttacgaatacggatatcgctctcatgtacattcaaggaatatgcgatgaaaaggtgctgaaagaagtgaagcagcgcctggaaaaaatagatattgacagtattttggaatctggatatattgagcagctgattgaagatgaaacctttacgacgtttccgactatgtatcatacagaacgccctgatgttgtagcgggtaatctgttagaaggaagattcgcgattattgtggacggaacaccgtttgtgcttattgccccggccttatttgtccagttttttcagtctgttgaggattattattcgcgttttgacattgcgacaagcataagaattcttcgtgttttagtctttttcatttcgcttgtggctccggctgtatacgtggcagccacgacgtttcatcaagaaatgataccgactcagctgttagtggtcattgcggcccagcgggaaattgtcccgtttccggctgttgtggaggcgctgacgatggaggttgcttttgagattctgagggaagcgggagtcaggctgccccgggttgtcggctcggcagtgtcaatcgttggcgcgctcgtaatcggccaggctgccgtacaggctggtatcgtctctccggcaatggtgattatcgtggcactcaccgcgattgcgagcttcgcaacaccggcgtttgcaatggcgatttcagcccggcttattcggtttatctttattattgcctcagctgttatgggtttttacgggctgattttagggatcattatgatgtttgtccacttatgcagtcttcgttcattcggcgttccatatatgtcgccgcttgcacccttttcttcacaaggcgtaaaggacgcgcttttccgggttccgtggtgggccgatgaaaaaaggccggaatcggtcagcaaggaagataaggtgcggcaggggcaagatcaacgcccagagccggccgcttcacgaggaatggtgaacaaagatttggaagaaggggatcagaatggtacgtaaatgtctattagccgttctcatgcttttgagcgtcattgtgctgcccggctgctgggataagcgggagctgacggatcttgcgattatctcggcgattggcatcgatcggacaaacgacagcaactacgtgctgcatcttcaaattatcaatccaggaaatgttgccggcggccttcagggaggcggtgctggagacaggccgcctgtatctgtctattcaattgaaggcgacaatttgacggaagcactcagaaaagcctccatgaaggtatcgcggcggctttattttgcccataccaacctggtcgtaatcagcgaaaagctggcgaaagaggaagggctggattttgtattagacaatcttgaccgggacacggaattcaggacaacggcgaccttcgtcgttgcccataaaacaaaagcagaaaatatcgtgaaaatcctgacgcctattgataaaattccgtcaaacaaagtcaataaaaccctcgatttcacggaggcgcaatacggtcgggtggtcaaaaccaatattcaggacgttttgaaaacacttgccagcgacacaagggcaccgattattccgggttatttgatgattggcgatgataaaaaaggagtcagcatggaaaacacgcaggcaactgacccgaaagccattcttcaggcagacggattggcgatttttgacaaggctgggtatttaaagtattggattgaagatgatgaaagcgtgggggcagtctggcttatgaataaggtccagcatacgtttattaatgctgattggggcaagacgaaggatgcggtcagcttgcaggttacccatcaagatacaaagctggtacctgatatgcggaacggacgtccgcacatccatgtgaaagtgacggttgaaggaattatagatgctgtcaaataccctttccaattgtctaatccgaaggtgctggccgctattgaaaaagcgctcaacaaagagcttgaaaaggaaatcagccatactgtgaaaaagatcaagaagaataagatagattttgtcggttttggtgacacgatatatagaaagtatccggagcagtgggagaaaatgaaggacacttgggacaaagaatatttgccggaactgcccatcgatgtgaaggccgagacgtatatcagaaggacgggattgcgaaacaatccgatcaaacaccagtttaaagatgattaggtctgaagaaaggggaagtgacagatggaaaaagccagaataagcataaggcagctgtttgtcatgattatcatttttgaactgggcagctccttattgattacaccgggatcaatggcgggcagggatgcttggatcgcagttctgttggggtgtgcggccggtttgtttcttttctatttgtatcaaggaatttatcaatgttaccccaattcttctccgaaagaatatatggatgatatgctgggaaccaagctgagctggctgttttcatttctctatatcttgtactttgcctatattgccgcaagggtcctgcgtgactttggagaaatgctgctgacatttgcttatcatgatacacctatcattattgtaaatggtttattagtgatagtaagcatatacgctgtaagaaaaggaatcgaagtgctcgcccgcgcggctgagctacttttcggagccatgtatttactgggcgcgatcggcctcgtgctgattgttgtctcaggttctatagacccgcataacttaaaaccggttttggcaaacggtatctctcctgtcctttactcagttttcactcagaccatgtacgttccgtttggcgaagtcgttttatttgtgatgattttccctaacctgaatgacagaaaagatgtgaaaaaaatggggatgattgccatagctattagcggattggttgtggcgctcaccgtggcgattaatatcagcgtgcttgatgttgatcttacactcagatcccagttcccgcttttaagtacgattcagacaatcaaggtcgaagaatttttagaccggctcgatgtcttttttatgctggcgctgatcatcggcggcttctttaaggttagcctctacttatatgccactgtggttgggacatctacgctctttaaggaaaagaacccctctcaattggcttatccgatgggattgggcatcttaatcctttctataacgatcgcgactaacttttcagagcacttgaacgaaggcttgaaagtggtgccgctgtatattcatttgccttttcaattattgtttccgctctttctgtttattgtggctgtttggaaaaagaaacgaagagagaagtcaaaagggacaggagcaaaaaaatgataaaaagagcggggggatgcagccgccgctctttttatgttcacttctatataaaagggggatatagggtgcgcccctgtctgcactggcagaggcgcgttttgttatacgactgcgacgttttccttcacagtaaagcttcctcttgaaagtctgatattgatgtctgacacttttgcaatttgttcatcgtgcgtcaccataatgacgcatttatcttccttgtgcgccagatcctgaaagagccgtacgatctcttttgatgtgtcctcatcaaggtttccggtcggttcatcggctacgataagatccgtgtcacagcagaaagcccttgtaattgatacccgctgctgttgtccgccgctcagtgtgagtactttttgccgggcttgtttttcgttgatgccaaccttctgcagcatgtcaagcgcatatgattcgttgttcttttctttagaacctgtgatttccatagcggttgtgacgttctgcaaagccgtcatatacgggagcaggttgtacgcctgaaagacgattgatacatattgatttctgaaattggttaagccgattttagaaaccgcttttccgccgtaaaggatgtttccttcttttggtgcgtcaagtccgcctgccagagacaggaaagtggttttccccgtccctgatgtgccgacgattgtgtagaatttgcctttttgaaagccgatgttaatatcctgaaacaatggctggcttttgtctttataccagtagccgacttgttgaaattctaataagctcataggttccgcctctttctattcctgttttgtcaatatcgttttcggatgaagccgcagtactgaaattgacggcagcaatgttgcaatgattgcgattaggatgccgatcccgccaagaataagcatgtcgttcatagaaaccgcgacgttcagtgaatcgataacgtccacgtttgatgaactgtggccgaacattttgccgcccatgccgccgccgggcatttgtccgcttgcggtttgcgttgaatcggttgatgaactgatttgctgggataaaagctgatttccaagctgatttgcgacgagatttcccgtcacagatgcaaggccgatagcgataacggccacaatcagaatctcagtcaagaactgtccaatcaatttccatcgtttttcaccgatggccattaacacgcccatttcgtatttgcgctccctgattgacatcatgacaatcaggccaagaatgacggcgcctgccactgatacaagatacaccacgtttttagagaaagaagccacattttcaatcggtccgaccatttgctggtaaagctgatcgtttgtattcagtgtgtacgtatcgaagtcaattgatgttttcttcgctgcttttacgaaagcatccatatttttcgcgtcgtccatatagtaaacagctgagtcaatcgtatttttatagtcgtcgcctttcagcgccgctgttgctgtgtaaggcgtataaagcttgttataaggatttaagaaagagaaattttgggcttggtcatcaccagaagatgttgttttataaataccgacaatcttcagctttaccgtcgtatcttcatctgttgctgattcaattgtgatcgaatcgccaacgctcaaatcattttcttccgctaatgtttcgttgatcactgttacttttttgccgacatctgattttgtaatcgcgcgtccgtcagtgatttttgaatccccgtcagagaaatcatcaactaatgctgtgctgatgacaccttcaatcgaaagatcagcttgaaccatttgcggtccgccttgtcctccgccttgactgtttttagcgtttgagcttgaactgctggagctggaatcacttgaactagagctttcaatcgcatcaaagtttcccgcgttggctgaagctgatgtggtgtaattgtagctcttcacatgatcaagcgctgcaagcttattcgcatcagacactttgatcggtgtggattcgaagctgcgcttttcaccgctgtcctgctgtttttccatttgcttttggcggtcaacctgaagtgtcacgcttccgccgagttcctgtctggccagttcgcttgatttttgtgctgccgactggatggtaaggcctgatagaacaaagacacatatgactgtaaacacaaataattgcaataacgtttttccctttttagccttcatattccaaaaggcccgtttgataaagttcatttatgttcctccgtataggtttttttatggataagaccgcctctggggcgcgcccgctgataaattaatagtagtccaaaggtatgaaaaaaatatgaacaatctatttctagttgatgaaataaaaactaacaattgtgaaacgcaaaaccttctgtttaaaatggtgctattatataaaaaagcatcaaaacaaccggaggatataatgaaaatattaatgatagaagataatgttagtgtatgtacgatgacggagatgttcttttttaaagaaggttttgaagcggaattcgttcatgacgggttagaagggtaccagcgttttacggaagaaaattgggatctgatcattttggatatcatgcttccatctatggacggcgtgaccatctgcagaaaaataagagagacaagcacggtgccgattatcatgctgactgccaaagacactgaatcagatcaggtcatcggttttgagatgggggcggacgattatgtcacaaagccgttcagcccgctgacattggttgcccgcatcaaagccgtcatcagaagatataaggcgacaggcaaagcggttattgatgaagatatgattgaaacggaatgctttaccattaataagaagacgagagaagtattattaaacggagagcctgtagaaaatctcacgccgaaggaattcgatctgctttattaccttgtccaaaatccgcggcaggtgttctccagagaacagctgcttgagcaggtatggggctatcaattttatggagatgagcgaacggttgacgttcatatcaaacggctgcggaaaaagcttgccagcgaggacaagcctttcctgtatactgtgtggggagtagggtataaatttgatgaagattaaatatttatatcagctgctgctaagccatatcagcattttgattttagcgtttgtcattatcatttctctgttttcccactttgtgaaggaatttgcctatcagaacaaagtagaggaattgacgtcatatgcggtgcagattgcaaatgaattccaagccggccaggtggacatgcgcaggctctatccttatcaggacatgttaagcacaagaaagacgcagtttatcatctttaatgaagagcagcagccctattttcttcctgaaggctttcatcacccaccaagggaacagctgaagaagtcagaatggaataagctaaaaaaagggcagactgtcatgatcagggcagatggccgttttgatgatgaagtgtcacttgtggcgcagcctatatttgttcagaacgaatttaaaggcgccgttctgctgatttctccgatcagcggtgttgaacagatggtcaatcaggtcaacctctatatgttttatgctgtgatcagcacgcttgtgattacgattctcgtgagttggcttctgtccaaattccatgtcaagcggattcaaaagctgagagaagcgacagataaagtggcttccggcgattatgacatccatttggaaaacagctacggggacgaaatcggcgttctggcgtctgactttaatatcatggcgaaaaaactaaagcagtcaagggatgaaatcgatcgccttgagaagcggagaaggcagtttatcgctgacgtgtcacatgaattaaaaacaccgctgacgacgatcaacggtttggttgaagggttgaacagccatacgattcctgaggataagaaggataaatgcttctcgctgatcagtgaggaaacgaagcgcatgctgcggctcgtaaaagaaaatctggattatgaaaaaatcagatcccagcaaattacattgaacaagctagacgttcctctgatcgaggtgtttgaaatcgtgaaagagcacttgcagcagcaggcggaagaaaaacaaaacaagctgatgatccaagtagaggatcacgtcatcgtacatgccgattatgaccggttcattcaaattctcgtcaacattacgaaaaacagcatccaatttacgaaaaacggtgacatttggctgcgcggaatggaaggttataaagagacgattattgaaattgaagacacgggtatcggcattccaaaagaggatattgagcatatttgggagcgattctataaagcagatatttcaagaacgaacacggcatacggtgaatacggactcggtctctcgatcgtcaggcagctcgttgaaatgcaccagggcacagtagaaatccagagtgaagaagggaaaggcacaaagttcataatccgccttcctttaacggcaaaacagcaatagcatacagggcggcgcatcaattgatgcagccgccttttttgcacaccgcttcggtttattgcgtgctcccgaaaacaaagattgcgtgtttttcgggttgggacggtctataaacatgataaaatatgacataaacagtttttgatgggagagggtgaaggaatgaagagcggggtaattccttcttcagcggtcggtcaaaaaattaacgagtggtacagatatatccggacattcagcgtgccggatgccgaagtgttaaaagctgaaatccagcaggaactgaaacacatgcagcatgattccaacttgctgctttattattcactaatggaattccggcaccagcttatgctggattatcttgagccgttagagaaattaaatatcgaagaccagccaagcctgtctgaattatcaagaaacattgacagcaatcaggcagatctcaaagggctgctcgactattacgtgaatttttttcgcgggatgtatgagtttgataagcgggaatttatttctgccattacatactataaacaggcggagaaaaagctctcctttgtcgcagaccatattgaacgggctgaattctattttaaaatcgcggaagcttattattatatgaagcaaacgtatttttcattgattaatataaaaaacgcctatgaaatttacgtggagcaggaaacctataatgtgagaatcattcagtgccatttcgtgttcggggtcaacctgatggatgaaagaaatttcgaacaagccgcacgccatttcaaattggcgctcaatatggcccaagcggaacaaaaagcccagctggtcggaagagcatactacaatctcggattatgctattacaatcaagaccttctaggccctgccattgattactttgaaaaagcggtctccacgtttgaaagcagcaggatcgtcaattctctcccgcaagcctattttttaatcaccctgatttattataaacagggaaaacatgataaagcttcggaatatcacaagcggggctatgaatatgctaaagaaacagacgatgcagactatgccgtaaaattcgagtttttgcaatccctatatcaggatcagcccaatgaagaaggaatcgaacgatgtttccaatacttaaaaaataaaaatatgtacgctgatatagaggatttagccctagaagtagcaaaatattactatgaacagaaatggtttaaactgtctgcttcctactttctacaagttgaagaggcaagaaaacaaatacaaaggagtgaaggtttgtatgaaattgaaatctaagttgtttgttatttgtttggccgcagccgcgatttttacagcggctggcgtttctgctaatgcggaagcactcgactttcatgtgacagaaagaggaatgacgtaagaacaagccccttctcattagcgagaaggggtttttcttttcaaaaaaacaccgcaagacatagtcttgcggtgccgccttcatggagattacgtttatttagtagcctcctacaaatgcagttcccacaatgatcaagaggataaataacacaacaatcaaagcgaaagaagttccgtaacctgacattttgtgcacctccttgcgagattgcttcagcaaatgctgcaaaactgtggcggacagggtcccgcagagacggtcagcagcttagaagccgccaacaaacgcagtccctacgataattaatagaataaacaatacaacgattaaagcgaaagaactgatgccgccgtaaccgccgccgttagagtatcctgacataaggtttcacctccctatgaaggatactataagatatgctgaaccgatccatttggcagggataatagtggacaagagaaaaaatgaagaattcggctatatgaaggtgatataaaaaaatagcgggcgctgccgcccgctatttatgtacgattaagagatcagcacgcccgcgaaaaattcctggtataacgcttgaacggcttttctttcttcggcttcttttacgccaaacatcatgctcacttcagaagacccctgattgatcatttcgatattcacctgtgcctctgataatgctttggcggctcttgccgttgtaccgacattgtggcgcatcgcttcccctacaaccataatcagggcgagatgatgctcgacgatgacttcatcggcatgcaaatcctcttcgatccgtttgatgacgctgcgttcagtggcggcatccatttgcccctgccgtaaaatgattgtcatgtcatcgattcccgatggaacatgctcatacgtcaaaccatgctcctccaggatttgaagggctctgcggccaaaaccgatttctctgttcatgagatacttgctgatataaatgctgcaaaaaccggtgtcgctggcaatgccgacgacaggcccgtttgtgttatcccgcttgctgacgacgcgggtgccttcggctgaggggttgttcgtatttttgatctgaacaggaatccccgctctgaatgccggaatgagcgcttcatcatgaaacactgaaaagcccgcgtaggacagctcccgcatctctctatatgtcagctcgctgatttcctttggattctcaacgaaggacggattgacagaatacacagcgtctacgtctgtaaagttttcgtacaaatcggcttgtagtccgttggcaagaatcgaaccggtaatatcagaaccgctccgtgagaatgtgatcacatcgccatccttgctgaatccgaaaaaaccgggaaaaatgatgagtccgtcacgttcccgaagacgatagaggttttgataggattcaggaagaacttgcgcgttgccgggttcatttgtcacaaagaggccggcatccttcgggtttacatatttcgctttgacgcctttataacggaagtaagcggcgatcagtttggcattgttatcctctccgctggccttgactgcgtcaaggtattgttcgggattgcttttgtctccttctaaaagcgtaaacagatcatctctgattttttcgataatgctttgccccagctgaagctcattggcgatgagagcgtaccgttccacaacagcttccgccagttcaggtgcgctgcctgttgccaaatattgttctgcacatgcgattaagagatcagtcactttcgtatcctcggcatagcgttttcccggagctgaaacgactacagctttccgtgccggatctgaggtaacgatgtgaaacaccttgtcaagctgggcgcctgaagcaagtgagctgcctccgaatttaacgaccttcatgtttacatctcctaatgtttaaaattttcacacaaatttagtatttattatctctctttcagtactgtaaatcaaggggggatttctttctcaggagaacatttgtatttttcacgaggaataatgttaggtttgctgaccgtatgcctgcgttataaagataaatatggtaaacagcctaacgttttgggatggaaaatggttagaatgattagtaaaattgataaatgactaggttaatatttttaaagaatattgactaaccctataaaaatggtaatatgtaaatgataatgataatcaattactatatggccatattgttttgagtccttgcggagtaggagatacgttctttttgctgtaaggatgtaaggaggcagcatgaagctacgttacttatttattctacttatcatattagcagtcacatctgtatttatcggtgtagaagatctgtcgccgcttgatctcttcgatttaagcaaacaagaggcgtcaacgctgtttgcaagccgtttgccgcgattgatcagcattgtcattgcgggattaagcatgagcatctgcggtttgattatgcagcagatcagcagaaataaattcgtgtcaccgacgacggcgggcacgatggattgggcgaggctcggcattttaatttccttgctgctgtttacatccgccagtcctttaatcaaaatgctggtcgcgtttgtctttgcccttgcaggaaattttctgtttatgaaaatccttgaaagaatcaagtttaacgacaccatctttattccgcttgtcggtttaatgctcgggaatatcgtcagttcaatcgcgacatttatcgcatataaatatgacttgatccagaatgtgtcatcatggctgcagggagacttctctttagtcgtgaaaggaagatacgagcttctttatctgagtattccgctcgtcatcattgcctatgtgtatgcggataaattcacattggccggtatgggtgaaagcttttctgtcaacctcggcctcaagtataaacgggttgtgaacatcgggctcattatcgtgtccctgatcacgtctcttgtcattttgactgtcggtatgctgccgtttctcggtttaatcatcccgaatattgtatcgatttacagaggagacaatctgaagagcagcctgccgcatactgcgctgttgggagcagtttttgtgctgttttgcgatatactgggcagaatcattatcttcccttatgaaatctcgattggcctgatggtcggaatcatcggcagcggcattttcctgtttatgctgttaaggagaaaagcctatgcgtaaccagatgaaaatagctttgctcgttggtttagccattgtatgtattggcttgtttttgttttatgacttaggcaattgggattacaccctgccgagacgaatcaaaaaagtcgctgccattgtgctgactgggggagcgattgcgttttcgaccatgatctttcaaacgattacgaacaaccgcatcctgacgccgagcattttgggccttgattctctctacatgctgattcagactggcattatctttttgttcggttctgcgaatatggtcatcatgaataaaaacatcaactttatcatctctgttctgctgatgatactgttttctcttgttttgtatcagatcatgttcaagggtgaggggagaaatatctttttccttctgcttatcggaatcgtgtttggcacgctgttcagcagcctgtcttcttttatgcagatgctgattgatccgaacgagttccaagttgtgcaggacaagatgtttgccagctttaacaatatcaatacggatttgttatggctcgcgttcatcatcttcctgctgacaggcgtttatgtctggcgttttacaaaatttttcgatgtgctgtcgctcggacgcgagcacgccgtgaatttgggcattgactacgacaaagtggtgaagcagatgctgatcgtggttgcgattttggtttctgtttcaacagcgctagtcgggccgattatgtttttaggccttctggtcgtcaacctggcgagagaattcctgaaaacatataagcattcatacttaatcgcaggctccgttttcatcagcatcattgcgctggtcggagggcagtttgtggttgagaaagtgtttaccttctcaacgacgctgagcgtcattattaattttgccggcgggatttattttatctacttgctgttaaaggagaataaatcatggtagaggtcagaaatgtaagcaaacaatatggcgggaaagttgttcttgaagagacgtcagtcacgattcaaaagggcaaaatcacctcgtttatcggtcctaacggcgccggcaaaagtacgctgctgtctatcatgagccgcctgatcaaaaaggattccggcgagatttacatagacggacaagagattggagcatgtgacagcaaagagcttgccaagaaaatgagcattttgaagcaggcgaaccaaatcaatatcaggctcacgatcaaagacctcgtcagttttggcaggtttccgtactcacagggccggctgacagaggaagactgggttcatatcaaccaggcgcttagctatatgaagctggaagacattcaagacaaatacttggatcagctgagcggcggacagtgccaaagggcatttatcgccatggtcattgcccaggacacagattatatctttctggatgaaccgctgaacaatctggatatgaaacactcagttgaaattatgaaactgctgaaacggctggtagaggagcttggaaaaacgatcgtgatcgtcattcacgatatcaattttgcttcagtctattctgactatatcgtcgctttgaaaaacggccgaatcgttaaagaaggaccgcctgaagaaatgatagaaacatcagtgcttgaggaaatctacgatatgaccatcccgattcagacgattgataatcaaagaataggtgtttatttttcttaatatatagaagaggtgaggagcatgaaaaagttcgcgttactattcatcgctttggtcactgccgttgtcatttctgcatgcggaaaccaaagcacaagcagcaaaggttctgatacaaagaaagaacaaatcacagtgaaacaccagctcgacaaaaacggcacaaaagtaccgaagaaccctaaaaaagttgtcgtatttgactttggaagcttagatacattagataaactaggacttgatgatatagtagcgggcctgccgaaacaagtccttcctaaatatctgtccaaattcaaggatgacaaatacgctgatgtcggcagcttaaaagagccagacttcgacaaagtggcagaattagatcctgatctgatcattatttcagcaagacaatctgagtcttacaaagaattctctaaaattgcgccgacgatttaccttggtgtagatacagcgaagtacatggaatcatttaaatcagacgctgaaacaatcggtaaaatctttgataaagaagacaaagtgaaagatgagctcgcaaacattgatcactcaatcgcagatgtaaagaaaaccgctgaaaagcttaacaaaaacggtctcgtcatcatggcgaacgatggaaaaatcagcgcgttcggccctaaatcaagatacggcctgatccatgacgtgttcggcgtgacaccggctgataaaaacatcaaagcgtctactcacggacaaagcgtttcttacgagtacatttcaaaaacaaacccggattacctgtttgtcattgaccgcggtacagcgatcggtgaaacatcatctactaaacaagtcgttgaaaatgattatgtgaagaatgtaaacgcagtgaaaaatgatcatgtcgtctaccttgattctgctacttggtacttatcaggaggcggtcttgagtctatggcacaaatgatcaaagaagtgaaagacggtttagaaaagtaaaaccaaaaagagcctccgctaaatagcggggctctttttttgttaatcagcgtgccggctgctgttcggcagggcgctgaggtttctttaatgtgaatgagagaaggaagccgacaagtgcaatgacggcagccactataaaagcggcgttcatgccgtgcagggcggcgtgcttcacatttgtcgtgcctgcatgtgccgcctggttgctcatcacggaaaccaatagtgcggttccgatcgagccgccgacttggcgaatcgtgttgttcatcgcagttccgtgcggaatcaagtggcgcggcagcgcattgattccggctgttgtcaccggcatcatgatcatggcggtgcctaagagacgaacggtgtataaaacgacaatccaagcgagtgacgtatggtcagtcagctgcataaacggcagagatgtcaggaagatgatgcagaaaccggcaatcgccagccctcttccgccgacacggtcaaaaattctgccgataatcggcgacataaagcccatcacaacggctcccggaaggagcataagccctgtatcaaaagctgtgacgtctctgacattttgtgtataaagcggcaggatggtttccgtaccgatcaataatgcaaagacgagggttcccagcagtgttgttaaactgaaaatgccaaacgtgaagacgcggaattccagcatcggtttttcaagcttcatttgtcttgtgataaacaagagcagcgcgatgacacccaccagcagtgaaatcaagacggttgaactggaccagccgtaagagccgacgcttgagaagccgtacagaaggccgccgaacccaaatgttgaaaggatgactgataaaatatcaatctgtgtttttcttaaagtcgtcacgtttttcatcaggatgctggcaagaatcaaatcaatcacagcaaacggaagaataatataaaacaatgatctccaagagaaagcttcgacagcccatccggaaagagtcggtccgatcgcaggcgcgaatgagatgaccaatccgaccatacccatagcctggccgcgtttttcaatcggaaagattgtcaggaatacagtctgcatgagcggcatcataatgccggctccggccgcttgaatgatacgcgctgtcagcagaaccgggaagttcggcgcgaacgctccgacgactgttccggcagtgaaaatgctcattgctgtgatgagcagcgcccggcttgtgaatttctcaattaaaaacgcggtaatcggaattaaaatcccgttggttaacataaatgatgtggtcagccattgtgcttggttggcatcgacattgaaatccctcatgatatggggaagtgcggtaatcaacaatgtctggttcaaaatcgccacaaacgctccggctaacaaaatgccgacaatgacagaacggttaaaaggtttttgttcaatacttgtgttcaatacatatcccttcttttctctaagtaattaacagtgtttttaacatggaaacgggctgtgttaaaacactggtttgttccagatagccaatcagtgatttgagtaaaaaagcgcggggttcttccttcttcgcttcttcctccagcatggcggctgcggatgtcagttcatctacgtcatagtccgcggcggacagggaagagatgcctttatgtaattccttcaggctttccgataataggactgatttatcctttggcttgtaggaggatgctgaatgaatataaagctcgatggcttcgggcggaagaagagactggcgggtttccctgtttttgataatctgattgagggtgctgatgataaactctgcgatcgggtcaagctcaagcggtttttcctcgattttgatcagcattaaaaactcacgcatcatgccgtgaagaatgataaccaaatcccacacaaacgggagaatggtttctccatacgcctggatcagcgaatcgcggtgccagcagataatcgtcgatctggtctgatggatatgctgtttgacccggtcattatgcagcttggggtttccgtaggtcagcatattgaaaaactgctgattccgcctgaagccctccagttccattttgaccttttgcgtcaaacgctcctccggtgtaagtgcggtattttcctgaagtcttgaggctgcggccaccatttgcttctggttaaatgacagcagctccaaaagcagatcttctttagattggaacagcttatatatcgaagcttttgacatcttacattcttctgcgatcgcctgcatggaaaccgacgtaaaatccttttccgaaaaaagctttcgcgcggctaacaagatatctgtttttttatcaagcatctcatggcttccttctttcttgaacattagaaaacccattggttcacagaaaaccaatgagtaactatgaaaaaattttaccaaataaacaaaatagaagtcaatggattttaaccgggtaaatgaaaggcctgccggaaaatccgacaggccgaataagagcttatttttcaactttaaatccttgtttttcaagcatttcacggatgtgcggatagtacaggcgctcatagtaggaagcgatgctctgtgaccaatttcttgtttcttttccgtttgtccgtttattcatgtattcagacatctgttcgtcgtatgcctgaatgtgagacgtcagctcatcctgattcaaataagtttcctgatgattgacagcttcctgcggcaagcgcggttttttcgctgaacggtcggcaggatgcccaatgacaaggccggataaagggaacacgtattttggaagctcaagcagttcgatcagctcttgagggtttccgcgaaccgcaccgatcggaactgtgccaagtccgagtgactcagccgctgctgttgctgtgccgagggcaataccagcgtctactgcgccgacaagaacagattccaatccatttgtgatttccattttgaaatcatgcagatcttcaagcgcaattttggcccgattgaaatctgcgcagaacagcaggaaaacaggagcttgatcgatccatggctggccgcctgccagctcggagattttctttttgcgctctttatcctggactgtgatcacagtcacctgctgtccgttgatagaagaaggggctgattgcaccgcttcaatgatttggtccaattgctcctgagctacaggctcatctgtgtagctgcgaatcgagcggtggtcttttaaagatttaatcacttcattcatatgggacaccctttctttactcgctaagctctgtgcggacaacatcaagaggggcgctcagcagttcttttccttttgcgacaaacccttggaaatgcgcagtttcgttatggaatttcattgccgcttcatctttccatttttcaagcatgacaaatgtattttcttcgcctactttttcgaataggtcgtattgcgcgttgccttcctcagctcttgaatgctgaacaagtgattgagcctcgctcaaaaattcctcgcgtttttctggttttactttgatgtaagcttgtaatacgatcatttaaatctcctccgttgttatgcgaatttattgttcgaatttcatcgaactaaatgtaacatgtattctaaatgaggtaaaggaaaaacccttatatagtaaaattgtcattctaattgttgtgtgatacatttgtgtcatgaacattccaaaccatccagaaacagaaacattgcagctgacaaaggttcttcatgcacttagtgatccgcttcgtttagagctcgtcaagcaattagctgaagcaaaagaaaaaacgtgcagcacctgtgcagatgtgcaggttgccaaatcgactttgtcgcatcattttaaagttttgagagaatcgggcatcgctcaagttcggatagaaggaaagcgccggtattattcgcttcgcgctgaagaccttgaaaaggcatttccgggcctgcttgaagccgtgctgaatgtagaccaggaccgctggtgaatcaatcccctgtaacggggatttttttatgtccgtaaaccgctttgaaaagccgctgcacacccgcctgaatatcttcttccttcagccgtgcaaagccgataatgagagcaggcctgcccgtttgccgcttgttttccttcaagttaaatcggctcattccgaatatttcaagctgcagcccggcagcatgtgacaggatgtcttgttcggtgcgcctggtatcaaattcggtaacaaaatgcagccccgcatttgccccttttacggtaacctctccgctgaactctgcttctaaagcggtgatcaggcgttctctcttttctttataatgctgcttcattttttttatatgcttctgatattcaccagactcgataaattcctgcagggtgagctgtgtgagtgatgagcaagtctgcagatcatagccccgctgtttgtatgccctcaacagctcaggcggcaacaccatatagctgatccgcaagccggggagaagggactttgaaaaggttcccatatagatgacattttgaaaacggtcgaggctttgcagcgccggaatactgtctacatcatatgtgaattcactatcataatcgtcctcaatgatatatcggcgcggctcctcggctgcccagttcagcagctgaattcttctggatacaggcataatcgttccggacggaaactgatgcgacggggtggtcaccagcacatctggctgctgtctggtgatttcagcaatcgacatgcctttttcatccagcatgatcgtctttacttgttttccggcattcttcaaaagctgatacatgcgcctgtagccaggctcctccatcgcatacacggcttccttgggtaaaagctcagtcaacagctgcatgagcacctgtgtgcctgcccctatgatcatttgttccggcctgcattttacacccctcgtcagggaaatgagcctcgtaatggccgctctcacttcatatatcccttgcggatgtgacatatcgccgagcgtgcggtatgagcgggaggccgctttttgctcgcagcggaaccagcttttgatcggaaaatggtctgtatcggaactcatgtgtgaaaacgatatccaatcgctctggtcgatgtgaatctcttttaggtcatccggcagtgcaaatggagggtgctcctcggcggaaaacatgtctagttcctccacgaagaaaccctttcgttcaatggcgtacaaatacccctcagccagcagctgctgataggctgaattcactgaatttacgctgaccttgagattttcagccagctcccgcttggagggaaccttcgagtgcggcagcagattgcggctgaggatttcttttttcagcttttgataaatttgctgatagatataatcggcttgttctgaacgatcgagtgtaatcgtgatatccatttgtattttctccttctgataccatcaaaaagttataattggtacttttcatcataccaaagagaagtcagaatgataagaaaataccgacagggggatattcacatgagtcaaacaacagcaagcatcacaactgcacaatggcagcaaaaacgggatcaatttgtgtcaaaaggtgtgagcaacggcaaccgcagtctggcggtcaaaggagaaggggccgagctgtacgatctggacggccggagatttattgattttgcaggcgccatcggcacgttaaatgtcggacactcgcatccgaaggtggttgaggctgtgaagcggcagacagaggagctgattcatcctggctttaatgtcatgatgtacccgacttatatcgagttagccgaaaaactgtgtggcattgcaccgggcagccatgagaaaaaagcgatttttcttaactcaggggcagaagcggtcgaaaacgctgtgaaaatcgccagaaagtatacaaagcgccaaggcgttgtctcgtttacacgcgggtttcacgggcgcacgaatatgacgatgagcatgacaagcaaggtaaaaccttataaattcggtttcgggccttttgcgccagaggtttatcaagcgccgttcccttattattatcagaagccggccggcatgagtgatgaaagctatgacgatatggtcattcaagcattcaatgatttctttatcgcttcagtggcgcctgaaacggtggcgtgtgtcgtgatggagccagtgcagggagaaggcgggtttattattccttcgaaacggttcgtacagcacgtcgcttcattctgcaaagaacacggcattgtttttgttgctgatgaaatccaaaccggctttgccagaactggcacttatttcgcaattgagcactttgatgtagtgcccgatctgatcacggtttctaaatcgcttgcggcaggcctgccattaagcggcgtgatcgggcgttcggaaatgcttgatgcggcagcgccaggggagctgggcggcacgtatgccggcagcccgctcggctgcgcggcggctttggcagtcttggatattatcgaagaagaaggactgaatgagcgatctgaagaaattggcaaaatcattgaagatagggcgtatgagtggaaaaaagaattcccgttcatcggtgacatccgcagactcggggcgatggccgcaatcgaaatcgtcaaggatccagacacgcgtgagcctgataaagcaaaagcagcagcgatcgcggcctatgcgaatcaaaacggattacttttgctgacagcgggaattaacggtaatatcatccgctttttgacaccgctcgtcatctcagacagccttttaaatgaagggctcagcatcttggaggcgggcctgcgagcttaatcattggaaagaaaacggctgggtctgctatcattttaagtaatcatgaaaagaaaggaatgttcaatatgccagatcaattaacggtctacaacccggctacgggcgaggagatcaaaacgattcctcagcaatcagccacagaggtagaagaagccattgaacgttcacatcaagcgtttaaaacgtggtctaaaacatcagcgaacgaaagagcgtctcttttgaaaaaatggtatgagctgattgttgaacataaagaagagcttgcagatttaattacaaaggaaaacggaaaaccataccaggaagcagtcggcgaggtactttacggcgcaggctatatcgaatggttcgcagaggaagcgaagcgtgtgtacggaagaacggtcccggccccgacaacgggtaaacgaattgttgtcacacgccagccggtcggccccgttgctgctatcacgccctggaatttcccgaatgcgatgattacacgcaaagcggcgcctgctcttgccgctggctgtacatttatcatcaagccggcgccggacacaccgctgtctgcttatgaactagcgcgcctcgcatatgaagcgggcattccgaaggatgttcttcaggttgtaatcggcgatggagaagaaatcggaaatgtgttcacaagcagtccgaaaatccgcaaaatcacgttcacaggctcaacacctgtagggaaaatccttatgaaaaacagcgcggacaccgtgaagcacgtctcaatggaactcggcggacacgccccgctgatcgtagatgaagatgcagacattgaccttgccgttgaacaggcgatggcgtccaaataccgaaacgccggccaaacctgcgtatgtgccaaccgcctgatcgttcatgaatccattaaagatgaatttgctgcgaaactgagcgagcaagtgtctaagctgaaagtcggaaatggacttgaggaaggcatcaatgtcggcccgatcatcaacaaacgaggcttcgaaaaaatcgtcagccaaatagatgatgcggttgaaaaaggcgcgaaggttattgctgggggcacatatgaccgaaacgatgacaaagggtgctactttgtgaatccgacagtgctcaccgatgtcgatacgtccatgaacatcatgcatgaggaaacattcggcccggtcgccccgatcgtcacgttttctgatattgatgaagcgattcagcttgccaacgatacaccgtatggcttggctgcttacttcttcacagaaaactaccgccgcggcatctatatttccgagaatttagagtatggcattatcggctggaatgacggcggaccgtcagcggttcaagcgccattcggcggaatgaaagaaagcggcatcggccgtgaaggcggttcggaaggtatcgagccgtaccttgaaacaaaatatttgtctatcggtttataaaagaatgcacgctcctgagagctgccggattttccggcagctctttttgtgttccggcgaataatcacaacaattccagccaaaataacagcaaatacattttgaaagaaggttccccaacaatggatttattattggctcttctcccggctttgttttgggggagcattgttctcttcaatgtgaaattaggcggcgggccgtacagccagacactgggaacgacgatcggggcactcattgtttctatcgttatttacttttttgttcagcccgttctgtcccttcgcatttttattgttggaatcgtatccggcttattttggtcacttggacaggccaaccagctgaaaagcattcaattgatgggcgtgtcgaaaacaatgccgatttccacaggaatgcagctcgtttccacctcgctgttcggtgtgatcgtgttccgcgaatggtcaacaccgattgcgattacgcttggcgttctcgctttgatctttatcattgtgggaatcattctcacgtccttggaagataagaatgataaaaaagagggcgagccaagcaatttgaaaaagggcattttgattctccttgtttcgactcttggttatttggtttatgtagtcgtggctagattattcaatgtgtccggctggtccgcgctgctgccacaggcaattggcatggtggtcggggggttagttttaacctatagacacaaaccctttaacaagtatgcgatcagaaatattctcccagggttaatctgggcaggcggaaatatgtttttgtttatttctcagccgcgagtcggcgttgcaacgagcttttccctttcacaaatgggaattgtcatttctacgctcggcggtattttcatcctgcgtgaaaagaaaacgaaacgccagctaatagcaattgcgatcgggattatcctgataattgccgccgccgtattcttaggaatcgccaaaacaaattcataacaaatggaggaggatgtatatgtatccggatttaaaaggaaaagtcgtcgctattacaggagctgcttcagggctcggaaaggcaatggccattcgcttcggcaaggagcaggcaaaagtggttatcaactattatagtaataaacaagatccaaacgaggtaaaagaagaggtcatcaaggcgggcggtgaagctgttgtcgtccaaggagatgtcacgaaagaggaagatgtaaaaaatatcgtgcaaacggcaatcaaggagttcggcacactcgatattatgattaataatgccggtcttgaaaatcctgtaccatctcacgaaatgccgcttaaggattgggataaagtcatcggcacgaacttaacgggtgcctttttaggaagccgtgaagcgattaaatatttcgtagaaaacgatatcaagggaaatgtcattaacatgtccagtgtgcacgaagtgattccttggccgttatttgtccactatgcggcaagtaaaggcgggataaagctgatgacagaaacattagcgttggaatacgcgccgaagggcattcgcgtcaataatattgggccaggtgcgatcaacacgccaatcaatgctgaaaaattcgctgaccctaaacagaaagctgatgtagaaagcatgattccaatgggctatatcggcgaaccggaggagatcgctgcagtagcagcctggcttgcttcgaaggaagccagctacgtcacaggcatcacgttatttgcggacggcggtatgacacaatatccttcattccaggcaggacgcggttaaacaaaaaaagcgacccagacatcacatctggatcgcttttttattacgcacgctttttcttaacaagtgctgctacagataaaataatggcagccgcagacagcacaatcgctgtaatgtctagagctgaagaacctgagttttcggaatcgtcttttgttttcgtggcgctgtgctcatctgtcacttgttttgcagacgtgatgtttgtaatggaatgaggtgtatcggcatcctcgtcacctgtccactcaacaatgctgccgtctttgtaatattggtatgcgtcccaagcagcttcctccgctttgtcagggtttttggcaacaaaggtaaactgctggaactgtccttcctgaatgcctccgtcagtcgcctcccatgtcacggacactgatttgtcatcatgtttttgagtggagaccttccagcccggaattggctcatattgctggaattcaacatccttcggcattttgaggactaccttcgttgtcggcagatttttctctgaaggaaccttcattgtatacgtttcccaagagcctgcagcagactcagccggttttacagaaacatgcgcgctggcaggggccgtaaagaataagagggagccgacaatagccggacatagtgtcaatgcgatttttttcaacaacgtaaacactccttaattggtctttgtaaacatgatattgatttcgttaaagtcgccggtcaggccgtggactttgatcttccagtttcctttttcattaatcgacaggttttgatcctggaagacgccttttgttttttcttttaatgtaaaagtgcttttgttttcgctgcctgacaggcctgttttataaacggttaacgtgatttgctggatgtttttcacgggatctccgttatggtcggtgacccgcagctcaaaaacattttttccgggctggtttgggctgatgctgagagaaacgctttgtccgttctcaatcgctttggtttggtagaacggttccggcgccggctcaggcgggcttggcaggcttgtaaacacggccgctgtgatcaatacagcgatgccgattgcccactccgctttcaacgttcggctgattcctgtgcggcgctgctttctggtaagcagaaaatgaatcgtgcctaagaccagcatgaaaacaaacagcccgcttttcactaaaagagcttgtccgtacgctgtatggaacagtgaatccattgaacgaatgatgaaaaatccattgagcaagcctgaaaacaaaatgacgccgactgcagtgagcgcccatggggagaaccgtctgaccgtctcccacgcgagcgttttgtcaggctgcctccattcttttgagagcagcaaaacgagtgccgctattccgccgacccagatggaagcggaagttaaatgaaggaaatccatcaaaatgccgaccgttttttcttcaacgacagcagcatgcccggtaaacgccttggcaagcaggagaccgaaaaagaaaatgagcggcgctgtccaatagccaaaggatgaaaagcggtttttccgtatcgcagggatgacagacagtgcgagcagcacgaacagcgcagcctgtatgatccaaatggagccgcctgctgtctcaaacagtgtttctctgatgtagcccgcctggaatgcgctgccccagccgccgcctgcgttcgcttttgtctgaatcggaagctgaagcaaaagcgccagacccagtgctgcgatcgagccggtcaggatacgtctcgtccgtttgacgagctgttctgatttccctttataccagaaaagatggaagaaaaccgttccgataaacagagataaggctgtatacagaatcgcgcgatctgctgctgttcccggattcagcgctgaatcggctgctttttggctgctgaatccgccatccgctttcccgatactgaacggaatgacgccggaaacaggatgtccatccgcggatacggcattccattccgctctgtacacatctttaggcagattcttcttcagcttcactgtcatgatgtgatgattatcttttttgatttcagtcttgtccgtatccacacggtcgccgtttgaattatagactttaatgtaatgaaacccttcttcaaccggttcattaaattcgatttccacctgcgcaggggcgctttttaattcgctgttttccccaggtgaagatttgacaatataggcgtgagcaaagcttgttttcggcaggaaaacaagaaaaagcagaaggatgatccaccatctgtttcgcttcatcactcagacaccaccttccgctgtatgtgttgtgttatttcttggtgcaggtgcagcgtttctttcggtcttgaagcatatcttccagcgcttggtcgaaagtgcggacggctccgccgaatcctttttgaaatcgttcggcatggtcaagtgtcgcaaacggaatggcctgcggctggcagcagtgcaggtttaattcagcatttacgacgaaataagccgaaccggcactgacggttgtctgtaacagaaaatctctgcaaatcaagtgtgaaacctcttccgttttatccgcgtaacgcaaaaacgcgcaatgtgcgcagcatagctgttcaatgtcttggtttaccgtaatcagctgaaccgaatgagcttgattgacgggcttcaagcaatagctgcacatatgatccgtttgaggtgttcgggcggggagcgtgatgccgccggccgttttaatgacctgatttgactgaaccagctgattgacatctctgtataccgtcatttccgaaacgccaaaccttgcgctgatgtcagaaattctgagcgcgccttcttctttcagccacttcagtatgtgttgctgtctattaatcggaagcattcatacaccctcttcattaagatctatttaagcgtagaggattttagagacagagacaagtaagctgatgataaaaaatgtgaaaatgtgttgaacaacaacaaaacgaaacagaagggactctggtataatagacatatggaatagaaagtgaggaataccctatgaaagaaacaccatgcccgaactgcggcaaacctttgacaggcgacatggtcagatcatcaaatgtgccttgtcaatttcgctgcggacactgccgggaacggctttatgaatataaagtatcagctccgattatgctggtatcattagcggccatcgtgctgctcatttatcttttgctgctcctccgcaatgcggcaggttcaatgctgccggctgtacagcacgtgccgatggctgtttttgcgcttgtgtgcgcctatcccgtttttattgtgagtgagcgaatgatcgcaaagtacgtgattcaaaatggcaacatcatttatagaggaaagagaaaaggctcctgatatcaggagcctttttatttttaaaaaattgtcacagtcatgtgccaaagtcctctttactttcaattgtatagggactgtaagcgttttaacatagagtcaaagggaagcatcattctctgaacatatttttttatcttacagcgacaaacaaaacagggagggtttatatatgcagcagcaagaacagcagcaaggcggcatgaaagtgaaagtgcaacgctttgggagttatttgagcggaatgatcatgccgaatatcggcgcgtttatcgcgtggggtatcattaccgcgctgtttattccggcaggatggtttccgaatgaacagctgaacacgctggtcagcccgatgattacgtatttattgccgcttttgatagcgtatacaggcggaaaaatgatctacgaccaccgcggcggagttgtcggagcgacagcggcaattggggtgattgtcggatcggatattccaatgtttttaggcgcaatgattatgggtccgcttggcggatacctcattaaacagactgataaattattcaaggataaagtcaaacaaggctttgaaatgctgatcaacaactttacggcagggattgtcggcgcggctttaacgattctcgcgttttacgccatcggcccggttgtcctgacgctaaataaattgctggcggctggtgtggaagtcattgtacacgctaatttactgccgatagccagtgtttttgtagaaccggcgaaagtgttgttcctcaacaacgccattaaccacggaatcttaagcccgatcggaatcgagcaagcatcccaaacaggaaaatcaattctgtttttagtagaagcaaaccctggaccggggctcggcattttgctggcgtacatgttctttggcaaaggatcttcaaaatcaacggctcccggtgcggcgatcatccatttcttcggagggattcacgagatttacttcccgtacattctgatgaaaccggccctgattctcgcagccattgccggcggagcaagcggactcttaacgtttacgatctttaatgccggacttgtcgcggcagcgtcaccgggaagcattatcgcattgatggcaatgacgccaagaggaggctatttcggggtattggcgggtgtattggtcgctgcagctgtatcgttcatcgtttcagcagtgatcctgaaatcctcaaaagctagtgaagaagacttggctgccgcaacagaaaaaatgcagtccatgaaggggaagaaaagccaagcagcagctgctttagaggcggaacaagccaaagcagaagaagcgtctgagctgtctcctgaaagcgtgaacaaaattatctttgcgtgtgatgcgggaatgggatcaagtgccatgggggcatccatcttaagaaacaaagtgaaaaaagcggagcttgacatcagtgtgaccaacacggccattaacaatctgccaagcgatgcggatattgtcatcacccacaaagatttaacagaccgcgcgaaagcaaagctgccgaacgcgacgcacatatcagtggataacttcttaaacagcccgaaatacgacgagctgattgaaaagctgaaaaagtaatcttatagaaagagagtgatactcatgcaagtactcgcaaaggaaaatattaaactcaatcaaacggtatcatcaaaagaagaggccatcaaattggcaggccagacgctgattgacaacggctacgtgacagaggattacattagcaaaatgtttgaacgtgaagaaacgtcttctacgtttatggggaatttcattgccattccacacggcacagaagaagcgaaaagcgaggtgcttcactctggaatttcaatcatacaaattccagagggcgttgagtacggagaaggaaacacggcaaaagtggtattcggcattgcgggtaaaaataatgagcatttagacattttgtctaatatcgccattatctgctcagaagaagaaaatattgaacgcctgatctccgctaaaagcgaagaagatttgatcgccattttcaacgaggtgaactgacatgatcgccttacatttcggtgcggggaatattgggagagggtttatcggcgcgctgcttcaccactccggctatgatgtggtgtttgcggatgtaaacgacacgatggtcagcctcctcaacgaaaaaaaagaatacacagtagaactggcagaagagggacattcatcagaggtcattggcccggtcagcgcgattaacagcggcagtcagcccgaagagctgtaccggctgatgaatgaggcggcgctcatcacaacagctgtcggcccgaatgtgctgaagctgattgctccatctatcgcagaaggtttaagacggagaaacactgcaaacacactgaatatcattgcctgcgaaaatatgattggcggcagcagcttcttaaagaaagagatatacagccatttaacggaagcagagcagaaatccgtcagtgaaacggtaggttttccgaattctgccgttgaccggatcgtcccgattcagcatcatgaagacccgctgaaagtatcggttgaaccatttttcgaatgggtcattgatgaatcaggctttaaagggaaaacaccagtcataaacggcgcactgtttgttgatgatttaacgccgtacatcgaacggaagctgtttacggtcaataccggacacgcggtcacagcgtatgtcggctatcagcgcggactcaaaacggtcaaagaagcaattgatcatccggaaatccgccgtgttgttcattcggcgctgcttgaaactggtgactatctcgtcaaatcgtatggctttaagcaaactgaacacgaacaatatatcaaaaaaatcatcggccgctttgaaaatcctttcatttcggacgatgtgacccgcgtagcgaggtcacctctcagaaaactgggagaaaatgataggcttgtaggcccggcaaagaaaataaaagagccgaatgcactggcggaaggaattgccgcagccctgcgcttcgatttcaccggtgaccctgaagcggttgaactgcaagcgctgattgaagaaaaaggatacagcggcgtacttcaagaggtgtgcggtattcagtcccatgaaccgttgcacgccatcattttaaagaaacttaatcaataaccgatcacccgtgacacaatgtcacgggctttttttactatctcgctatctagtataatagaaagcgcttacgaaaacagggggaggagaatgacgatgaaacaattcgagattgcggcaataccgggagacggagtaggaaaagaggttgtagcggctgctgagaaagtgcttcatacagcggctgaggtacacggaggtttgtcattctcattcacggcttttccatggagctgtgattattacttggagcacggcaaaatgatgcccgaagatggaatacatacgcttactcaatttgaagcggtttttttgggagccgtcggaaatccgaagctggttcccgatcatatatcgttatggggcctgctattgaaaatccggagggagcttgagctttccattaatatgagaccagccaaacaaatggcgggcattacgtcaccgcttctgcatccaaatgattttgacctcgtggtgattcgcgaaaacagtgaaggcgagtatagtgaagtcggcgggcgcattcacagaggcgatgatgaaatcgccatccagaatgccgtgtttacgagaaaagcgacagaacgtgtcatgcgctttgccttcgaattggcgaaaaaacggcgcagccatgtgacaagcgccacaaagtctaacggcatttatcacgcgatgccgttttgggatgaagtctttcagcagacagccgctgattatagcggaatcgaaacatcatctcagcatattgatgcgctggccgctttttttgtgacgcgtccggaaacgtttgatgtcattgtggcgagcaacttgttcggtgatattttaaccgacatcagctcaagcctgatgggaagcatcggcattgcgccttctgcgaacatcaatccatccggcaaatatccgtccatgtttgaaccggttcacggctcagctcctgacattgccggacagggccttgccaatccgatcggccagatttggacagcgaagctgatgctcgaccacttcggagaggaagaattgggggcgaaaattcttgatgtaatggagcaagtgactgccgacggcatcaaaacacgcgacattgggggacaaagcacaacggctgaggtcactgatgaaatctgttcgcgcttaagaaagctctgatgaatcaggccggtggcagatggctgccccggcctgtccatttccttacgaaaatttccacgaaagtctaaccaagcagatccaaatgctgtataataatttggaattcttaggaaagcatcgggtgaaggaagttgaatgcaaaaacaatcacgttaaagaaaaaaagaaaaatcaaaacgatcgttgtactcagtatcattatgatcgcagctctcatttttacgattagattggtgttttacaagccttttcttattgaaggatcatcaatggccccaacgcttaaagactcagaaagaattctggttgataaagcagtcaaatggactggcgggtttcacagaggagacatcatagtcattcatgacaaaaagagcggccgctcatttgtcaaacgtttaatcggtttgcctggtgacagcattaaaatgaaaaatgatcagctatacataaatgataaaaaggtggaagaaccatacttaaaggaatataaacaggaggtcaaagagtcgggtgtaaccttaacgggtgacttcgaagttgaggttccttccggtaaatattttgtgatgggagataaccgtctcaattcactggatagcagaaacggattgggcatgccttctgaagacgatattatcggtactgaatctctcgtcttttatccattcggtgagatgagacaggcaaaataaaatgcaatgcaaaaagaacatggaacatgacggcaccgataataaagcgccgtgcacgtttaaaaaaatgatgatgaaacggtgcggagccggctttccgccccgttttttatgatagaaagcgttttgaagaaaagggccctgttgaaataaacagaatcaggattggcgaagccgtgaagcgcatcgaattggtaaatctcaagatgggtatgctgtttttcccgcagttttttgataagaagcgctacgtcaaacgacggctcataattagggaaaaacaataggaccgggcaggctggcacgtgatgaagagagtcgcgtatccgggaaccgtaataacaaaccgatccgctcacctcaggcatactgctgcatttccatgcgatagtagcccccacgctgaatccaatcacaaagatgtgccgtccggcgttttgcctgatcacattctggatgatggtttctcccgttttcagccgttcgtgttttgtaaattgttcgtatgccgttttttcttcttgcagtgtgtagacttcattctcgccgagcaggttgggcgtcaacacatcatatccagccattttgatcagccggcccatctttttcatatggctgtttacaccgtatatttcgtgtacgagaatgacaagcggttttggggacataacggcctccttttgtgttttttccattatatcctatcgtttcactttaggctgagatataatggtcaaaaaaggagatataaaatgaactcattatctttgcctcaccgctatccatttttgtttattgatggcgtgacggatagcgagcccggcaaacatgcggcagcttataagctgattagtgagaacgactggtttatcactgatacgcaaacagaaatgccgttttcacttgtgattgaagcgcttgcgcaaaccgcggcttttacaggaattacagatgagaacagcttgggattattgtcttcggtgaagaaagcggaaaagctgggagaagctgtgcctggtgaccggcttgatcttacgtttgaagtcacgcgcaatcggcgcgggtttgtgttcggacatgccaaggcgtcagttggagagcagcctgttgctgaagctgaaatcggcatctatattgaaaaatgaaaaaaacccttcacaacattttgtgaggggttctattttgtgtcgtaatcccgttcgctttgagagttatctctttgctggcgtttgtgtttttcatcattcatattttccttcagctcttcattaggaatcggatcggttaagtcgttgtgctcggggttttcatttggtttgttttgctgttttttttctgtcatgtttgatcacctcaccgtttgttttcctcttatccgttctcctcaaacataggaaaccgcttttttgtcccgctgggtataatgtattagaatagagagaagcacaacaaaaagataaagagaggtacatatatgtctgttcaaagagaagatgtagatatcaagctgatcgcaattgatatggatggtacactgctgaacgacgagcagctgatctcggatgaaaaccgcaaagccattcgtgaagcggaggataaaggtgtgtatgtggtgatcagcacgggccggacgcttatgacgtgccgggaactggcggaatcgctaaagctgtcatcctttctaatcacggcaaacggcagtgaaatttgggattcgaattttaatttggtggaacggaagctgcttcatacggaccatattcaaatgatgtgggatttgcggaataagcacaacactaatttctgggcttctacggtgaataaagtatggagaggcgagtttccggaaaacattacggatcatgaatggctcaaattcggctttgacatcgaggatgacgatatccgaaacgaagtgcttgaggagctgagaaaaaacaaagagctcgaaatcacaaattcaagtccgacaaacattgaagtcaacgcgcttggcatcaacaaagctgcagcccttgccaaggttacggaaaaactcggctttacaatggagaatgtgatggcgatgggcgacagccttaatgacattgcgatgatcaaagaagcgggtcttggcgtcgcaatgggcaatgcgcaagacatcgtaaaagaaacggctgattatatcacggatacaaatattgaggatggtgtcgctaaagcgattcgccattgggtactataaaaaaagagagtcctaagatggactctcttttttagtttggcaggttttattctgggaccatggtaggttttctgacaaaagtatttcacaaactgatatgattcacttataatgaaataaagttcaaaaattcggaatagtcgttccgaatttcgggacaataaatgacataaagcatatcgtttgctttggcaggagggattctgtgtttcagattgatttaaactgtgatttaggagaaagcttcggagcctacaagataggccttgaccaagatattttagagtgtgtgacatcagcgaatatcgcatgcggatttcatgcaggagatcctagtgttatgcgaaaaaccgtcgcgcttgcagcagaaagaggcgtgaaaatgggtgcgcatccgggcttgccggatttactcggttttgggcgccgcaatatggcgatttctcctgaggaagcgtatgatcttgtcgtttatcaaattggcgcgctctctggctttctaaaagcagagggacttcacatgcagcacgtcaagccgcatggcgctttatacaatatggcggcagtcgatcaaaaactgtcggatgctatcgcgaaagctgtctataaggttgatcccggcctgattcttttcggtcttgctgagagcgagcttgtaaaagcgggagaacggatcggacttcagaccgcaaatgaagtgttcgccgacagaacataccaatcggacggcacgctgacaccgcgctcccagccggacgcactcattgaaagtgatgatgccgccgtcacccaggtcatcaaaatggtgaaagaaggggcggtcaaatctcagcaaggacatgatgtgtcattaaaagcagatacagtctgcattcatggagatggagcccatgcgctgacatttgcgcaaaaaatcagaaaacagctcaaagcggctggaattgaagtgacagctatttcagaacagaggtcaacataaaggaggaacaatagatggagcagcagaaaaagacagcaggaaaaaaagcgggcagctggtcattgctgatgggcgccgcctttttaatggcgacatcagcaatcggaccgggtttcctcacccaaaccgcaacattcacaaacacactcgcagcaagcttcggttttgtcatcttaatctctattattttagatattttcgcccaaaccaatgtgtggcgcatcatcgcagtttctggaaaacgaggtcaggaaattgcgaatatggtgcttcccggactgggatatttcatcgccattctcgtcgtgcttggcggactagcttttaatattgggaatatcggaggggccgggctgggacttcaggtgctgttcggcattacacctgaaacaggcgctttaatcagtgccgttatcgccattttgatttttgtcatcaaggaagcaggaaaagcgatggaccgttttacgcaaatcgcggggttcgtgatgattattttaacggtctacgttgcggcgacgacagctcctccagtcggacaggcagtcgcaaatacattcgtcccggaacacatcagcatatttgccattgtcaccctagtgggcggaaccgtcggcggttatatcacatttgccgggggacaccgtttgcttgatgccggaattaaagggaaggaatccattccgcaggtgacaaaaagctcggttgtcggcattttaattacatctgtcatgcgtatcgctctttttcttgcggttctaggcgttgtatcgaaaggcctgcacatcgatgaaagcaacccggcggcttctgtcttcaagctggctgctggaaatgtcggttataaaattttcggattgatcatgtggtctgcggcgattacgtctgttattggagcagcctatacatctgtttcatttttcaagaccttttctccaaaaattgaaaagaattcacgcggtattattatcggatttattgtggtttctacgttagcttttgtcacaatcggccagcctgcgaagatcctcgtccttgtcggttcactgaacggcttaattctgccgattgcgctcggaacgctgcttgttgccgcctacaagaaaaacattgtcggtgattataagcatccgctttggctgacaagcacaggcgcgcttgtagtgattgtaatggcagttatgggaatctacacgttaattacacaacttcctcaattgtggagctgatataagtggagcaattaaacaaaatggcgccaaaggatgtacgcgccctgatacgagaggggaaaataaacgggccgaccgcaggcatgtctggcggctacgcccaagcgaatcttgtggttttgaaaaaggaccttgcttttgattttctgctgttttgccagcgaaatcaaaagccctgccccgtgctggatgtgactgaagcaggttcgcctgtgccgtctctggctgcgccggatgctgatatcagaacggactttccgaaataccgtatttacaggcacggtatcctaacggaagaagtatctgatattacgccatactgggaggacgattttgtcggctttctgatcggatgcagtttctcctttgaacaggcactaatcaataatgggatagctgtccggcatattgatgaggggacaaacgtctcgatgtataaaacgaatatcgattgtgttccggcgggggcgtttcacggacagatggttgtcagcatgaggccggttcctgaacggctggctgtacgtgctgcacaagtgacctcgcgttttccggctgtgcacggagggccgatccatatcggcaatccgggagcaatcgggattcgcgatctcgggaaaccggatttcggagatgccgttcccattcgtgacggcgaggttcctgttttttgggcatgcggggtgaccccgcaagccgtggctatgaatgtaaagcctgaaatggtcatcacacatgcgccggggcatatgctcatcacagatattcgagacgagtcgcttgcggtgctgtagcctctcgtcatcctgatgaacgagaaataaaagaggtgagaaagatgactgtacgatatcaaatcgaacagctcggtgattctgcaatgatgatccgattcggagaagaaatcaatgaacaggtcaacggcattgtccatgccgcggccgcttatatagaagaacagccatttccgggattcattgaatgtatcccggcttttacaagtctaaccgtattttatgatatgtatgaagtgtacaagcatttgcctcaaggcataagctcaccttttgagagtgtcaagcgcgatgtcgaagagcggctggcagaaatagccgaagactatgaggtcaaccgccgtattgtagaaattcccgtttgctatggcggtgaattcggtccggatttagaagaggtggcgaagatcaatcaactgtcaccggaggaagtaatcgacattcatacaaacggtgaatatgtggtgtatatgcttggcttcgcgcccggttttccttttctaggcgggatgtcaaaacgcattgcagctccgagaaaatcatcgccaagaccgtcgattcccgcaggttcggtcggtattgcgggattgcagacaggcgtttatccgatttcaacgccgggcggctggcagctgatcggcaaaacgccgctggctcttttccggccgcaggaaaacccgccgacattgctgcgggcgggagatattgtgaaattcgttcgcatctcagaaaaagactatcacgcctataaggaggagtccaattgagcatgaaagtattaaagcccggactgctcacaacggttcaggatataggcagaacgggttaccaaaaatacggcgttctggccagcggcgctatggacacggtttcactgcgcattgccaatctgttgataggaaacggcgaaaatgaagcaggtctcgaaataacgatgatggggcccggtccgtcgtttcatttttcaaaacagacactgattgctgtgacaggggcggacttcacgctgcgtattaatgacgaggaagcgcctttatggaagcctgtgctcatcaaggaaaacagcacggtcagctttggcccctgcaaactcggcagccgtgcttatttggcggcagctggcggcattgaggtgcctgccgtcatggaaagtaaaagcacatacgtcagaggaagcattggcggacttcatggcagagcgcttcaaaaagaagatgaactgaacattggagagatgtcagctctttcgcaaaccatcctttcccgcttaagttcgcagcttggaaaacagggatttgcagcaccgaagtggtcagtcagccgcggcagatttctgccattgaagaagaatcccgtcattcgggtgctggaaggaaagcaatttgcctttttcacagaagaatcaaaaacgcgtttttatgaagaagcatttcgtgtcacgccgcagtccgaccgtatgggctacaggctcaaaggagaaccgctcgaactgaaggccccgcttgagatggtgtcggaagcggtttcattcggaacagttcaggtgccgcctgacggcaacccgattatcctgcttgcagaccggcagacgactggcggctatccgaggatcgcgcacatcatatccgctgatcttccgattgtttcccaaatcatgccgggcgagcacgttcagtttgagcctgtgtccctccaggaggcagaagcgcttgcggtagaacgggaacagcatataaaagaactgaaaacgagaatgaagatggaatggctgacatagcaaaggggatgaatgatgcagaataaaaataaaaccgtagtcaaatctatggcgctgcttaatttgtttttgcataaaccaagcctaaccttaagtgaactggtgtcgctgacgggaatgccgaagacctctgttcaccggatggtcagctccttggaggaaatggggttcctcagtagggatgcgtccggcgcttattcgctgggattggtgtttttggaattcggacagcttgtcgctgacaggctggatatcagaaaaatagcgaaaccggtgatggaagagctgtgccgggaagtggatgaggccgtgcagttgatcatgagggacggcaatgaagcgatatacgttgagaaaatagaagggacacagactgtgcggctgtatacggcgatcggcaggcgttcccccctatacgcgggagcgtgcgccagaagcattctgtcctttcttccccgtgaagaaatcgaagcatacatcaaacaaaccgagctcatttcgattggctccggaacgattaccgatcccgaaaaactgcttcaggagattgatgcctctgtgcaaaatggctatactgtcagctattcagagctcgaaaactatacggcggcgatcggcgccccgatctttaaccatgagcgccaggtggcagccggcattagcattgcaggctttgaagcgagatttacagaagacaggctgccctatttaacagaaaaggtgaaggacgccgctttacagatttcaagaaaaataggatatacataagtagccaatcttttctctgctgcgtacattaacgtatcgacgttcaagagtggaggaaagaacatggtgcttcgatatacagctctgggcgattccttgacgacagggagaggctccgggctgttttcacccggcttcgtccagcgttttggggacatgatggaagctgacttgaaaacaagaacggcaataaacatatttgccagatcaggcctgaatacagaagagattttgggactcctgtcatatccctatgtgcaaaaatgtattcgagatgctgatatgataacgatcacagggtgcggaaacgatctcatcgattcggtcttagcctaccaaacctctaaggatgaaacgattttcagccgtgtatccgcccattgccatgagaattttgaaaagatgattgccaaagtcgccgagattaaaggagaaaatccttccccgtacgccattcgtgtgttcaacttatacaatccgtttcccgaaattgatatcgccggcaaatggatcacttcgtttaattcacatttagaaacacttgcatcagcaccccatgtcaaaatcgcggatgcctatagcatcttcaaaggcaaagaacaggaatatctgtcctttgacggtgtccatccgaacagcaaaggctatcaagcgatggctgaagccgttcacaagctaggctataaagaattatcagtttcatagaaaacgcgcctcatgacaggcgcgttttttatgtgtgatcgaaatattaaaagaaacttaaaattctctgtcttctgttctacagacaaacaaagtgcgctagaataatggagggcgtaggcaaatatagccataacgttcaatatttcgtatataaggaaggatggtccttttgtttcggatttttaaaatgtcttttgcggttatcattattatactggcgcttattgcttttaactatacggaacacacctctgttatccaatcggtcatgctcgtctttcttggtgcggtcatgtttatgcaggggcttgaagaacgcaaaaaagaaaatgacggctcaggcgcttttaatatttataccgccgtttttgtatggtctgtctcccttatcggttttacacttcatattatataaatctattacacatcctgaaaatgctcgaccgtcgggaacggggtatagaaccgatgaagcaaggctttccactcttgatactctgaagaaccgcgaaagccttccgtatggtcctcaagtgtttcccactccacaagaagcagatatttatgcgtttcctccatgcattttgataacgagtgcgtgatatagcccttcatgccggaaataatcggcgccgcttgccggaatgcatcctcaaactcttgttcaaggccttctttaatgtgaagcattgctgcctccctgaccatgctatcccttctttctgtcttttcgaatagtctacagcaaacgataggagatttctgcaaaatcggtgaacttttccttcattttcaaaaaaatcttgcacgcaccaattcaattaagagaaaataacaagtggaaggcaggggaaagtcatgttaaaaaagtgtattctactagtatttctatgcgtcggattgattgggttaatcggatgctccaaaacagattcaccagaggatcgcatggaagcattcgtgaaacagtggaacgatcagcaattcgatgacatgtatcaaagcctgactaaagatgtcaaaaaagaaatctccaaaaaagatttcgtcaacaggtataaagccatctatgagcaggccggcgtaaaaaatttgaaagtcactgcgggagaagtagataaggacgatcaagacaacaagacaatgaaacatatcccgtataaagtcagcatgaacacaaatgccggcaaagtcagcttcaagaatactgctgtgctgaaattagaaaaaacagatgacgaggagtcatggaatatagattgggacccatcgtttattttcaagcagctggctgacgacaaaaccgtgcaaattatgagcattgaaccgaaacgaggccaaatttacgataaaaatggaaaaggtttagctgtcaatacagatgttccggaaattggaattgttcccggagagcttggcgataaaaaagagaaagttataaaagaactcgccaaaaaacttgatttgactgaagacgacatcaagaaaaagctggatcaaggctgggtaaaagacgattcgtttgtgccgctcaaaaaggtcaagcctgaccaggagaaattagtttctgaagcgacgtcattacaaggcgtaacaagaacgaatgtcagctcccgctactatccgtatggcgaaaagacagcccatttgacaggctatgtccgcgccattacagcggaagaactgaagaaaaagaaagaaggaacgtacagcgatacgtctaacatcggtatcgccggacttgaaaatgtgtatgaaggcaagctaagaggcacaactggctggaaaatctacgtgccgcaaaccggggaagtcatcgctgaaaagaaagcaaaggacggcgaggatcttcacctcacaattgatatcaaaacgcaaacgaagctgtatgatgaactgaaggatgacagcggggcggcagtcgcgctgcagccgaagacaggcgaaacactcgcccttgtcagcgcgccttcctacgatccaaacggatttattttcggctggagcgataaggaatggaaaaagctaaacaaagataaaaacaacccgttttcagcgaaattcaataagacatacgcgccaggttctaccattaaaccgattgcggctgctattggaatcaaaaacggcacccttaaagccgatgagaagaaaacaatcaaaggcaaggagtggcaaaaagattcgagctggggcggctattcagtgacacgtgtgtctgagagacttcaacaagtcgatttggaaaacgcccttattacgtcagacaatatttattttgcccagaatgcgcttgatatgggagcggacaccttcacaaaaggcttgaagacattcggtttttcagaggacgttccgtacgaattcccgatccagaaatcgtctattgcaaatgacaagcttgattcagacattttgcttgcggatacaggctacggacaagggcaaatgcaaatgtctccgcttcacttggcaactgcttacacgccatttgttgacaatggagaccttgtcaaaccgacgctgatcaaaaaagattcacaaacagctgatgtttggcacaagcaagtggtcacgaaggaaggagcggcagacattacaaaaggtctgaaaggcgttgtggaagatgagcgcggatcagcgtatcagcctgtcgtgaaaggaatcacagtggctggaaaaacaggaacagccgagctgaaaacatcaaaagatgataaagacggcacggaaaatggctggtttgtcggctacgattacaaaaacaaagacctgcttgtcgccatgatgatccaaaatgtgcaggaccgcggcggcagccactatgtcgttgagaaagcgaaaaagcaatttcaatcgaattaaaatgtctttttaaaaggagcgaaaggaaaaagaggatctgaggccgaatgaactagtaaggggcaaaacccggtttatacaaagaaaagagggattttgcatgcagcgtattcaattggcggaggatcttcaattttcaagagtcatacacgggctttggcggctgaatgaatggaactattcagatgctgaacttctaagcctcattgaatggtgtatcgatcacggcatcacgacctttgatcatgcggatatttatggaggctatacgtgcgaaaagctgtttggaaacgcccttgccctttcgcctggattaagagaaaacatagagttggtcacaaaatgcggtatcgttcttgaatcgcctgaacggcccgctcacagatcgcatcattataacacaagcaaatcgcatattttggcatccgttgagcaatcgcttatgaaccttaggacggattatatcgatatgcttttgattcacagaccggacccgctcatggatccggagggggtagcagaggcgtttcaggccttgaaatgctctggcaaggtcaggtactttggcgtttcaaattttaaagatcaccagtatcggatgctggaatcatatttgcctgagaagctcgtaaccaaccagattgagctttccgcatacgaattagaaaatatgctcgacggcactttgaacctgtgccaggaaaaacgtattccgccgatggcttggtcgcctctggcaggcggcaaagttttcactggtgacacggaaaaagaccggcgtgtccgcacggcgcttgaatccgttcaagcagagattggcgccgcttcattggacgaggtgatgtacgcatggctgtatacgcatccggccgacatcatgccgattgtcggaagcggaaagcgcgagcggatttccgccgcgataaatgcgttgtcatacaagcttgaccaggatcaatggttccgcatttttacagccgtacagggttacgatattccataaaaagcatcagcttaccagctgatgctttttcaatattgtcacaccgcatagtgccaaattaccatttataagtgattgattctttcttgaaagcgttttatattaaaaggaaacctctctatatcctctactgcatctccttgcgacttcatccgcacatcaagattgtctaggaggtcttttttatgtatatgactgccagagaacaaaagctgttaaagcacttattattacaaaacagatatataaccgtaactgagcttgctgagctgatgcaagtcagcacgagaaccattcacagggaactcaaatcaattaaaccgctgatggaaaccgttgggcttacgttagataaacagcccggtaaaggtttgaaagcagtgggaagtcccgaagataaacaaaagctgcttactgatttatcatatgaacagcatgaatacagcgccgacgaacggaaactgctcattctttgttcgttattagagtctcaggagcccgtcaaactgtacacgcttgctcatgatctccaggtgacgaatgccacggtcagctatgacttagatgagctcgagaagtggatttctcccttcggactgacactgatccgcaaaagaggttttggcatccagcttatagggccggagaatgcgaaacggaaaattgtcggcaacttgattgtgaaccgtctcgacatccaaatgtttttggaagcggttgaattaaacatcaaaggaaaaaccgattcttcagagaaaatgttcggggttgtcagcaaaggtgagctgttaaaaatggagcgcatcttatttcagctcaaagaaaaaatcgctttttcattgtccgacagctcctatatagcgctcgtcgtccatctgacgtatgctatcgaacgaattaagcttggggaaactatcaccatggagcaaaatgagcttgaggaactgaagaatgcgaaggaatacagctccgctcttgaaatcgcgggcgagcttgaacgtgccttcggcgtgacgattccagaggcggaggtcggctatattacaatccaccttcgaagcgccaatcgaaaatacaaaacagaatacaaagcgcaggaaattgagctggaaacagccctgcaaacaaagcggctcattgcttttatttcagacaaaatcagaatggatctgacgaaaaactactctttatatgaaggcttgattgcccatttggagccggccgtcagccgcataaaagaaaatattgagatatacaatccgatgaaggaacagatcaagcgcgattattttctgctttatatggcgatcgaagaaggtgtcgaaaagtattttccgggcatgtccttttctgatgatgaaatcgcttttatcgttcttcactttggctcggctcttgaaatcaaaaaagaagaagcaaaagtgaaagcgcttgtcgtctgctcaagcgggatcggctcctcgaaaatgcttgcctccagactgaaaaaagagctgccggaaattgaatcgtttgatatgtcatccctgatcgagctaaaggggaaggatgttcaagcctatgatatgattgtgtccactgtaccgattccttatgaaaacattgattacatcatggtcagcccgctattaaatgaggaagacgcaaaccaggtcaagcagtatatcaagcggaagattccccttattcttaacaaaaaaagaagcccgaaggaagaggcgcagcaagctgatgtacctgacatgctagaggcggcggaaagcataggccggtatatggaagttatccaagatgttctgcgccattttacgctagctcaactcaaaacaaacccggaccatagcatgcttctgctagagctttttcaacagctgaagaaggatggcctgatccgtgatccggaaaaagccgcggtttgcctggctgagcgggagaaacaagggggattgggaatccccggaacaaacatggcgctttatcatctcaaaaatgatgaaatcgtcctgccttttttcaaaatgtttgatctcagcacctcctatgaagtggatggcatggacggaaataccctcaggatgacacgcattctcgtcatgatggcgcctagctcattatctgctgaaggctcggagattttaagcgcgatcagctcggcaattatcgagagcagagaaagcatggcggggtttcaggaagaaggagaacaagaattgtatcagcggttaaaccgcatatttttcacatggatgaaagaaaaaaacatactgtaaacctgcatggcacacgtcaaaaatttggcgtgtgtttttctgtggatggggaacaaaataagaaaatgtgggactattttatcattcagtattggaataattccaaaatgaaatagttttacaagttatcttttttgggttaaaatgggtgaggcaaggaagaaaatctaacaaattattgaagattcaagagaatataggagatgacgatatggaaacattacagcatctgattctgcatgacatgccgaatagcgaagaaatagaggctgtaaaaagcggagaccatacactgacatataaaggttaccgtaaacggattaatcagctggcgaatgccatgcttcaaaaaggaattcaaaagggcgaccgtgttgcattgctttgcaaaaacggccatcccgcatcaactgttatgttcgccgcgcttgaaataggtgctgttgtcgtacctgtcagctggcagctgaaaccatatgaaatgacaggcattttaaaagcaagtgaaccgaaagcgatgttttacggagcggagtttaaagagatactggatgaagttctacctgaattgtcctcactgtgtgtaacaatggaaacaggaacagcttacgaaacatctgctgaatttgaagcgctgtttgcaggtcctgatcatttgccagagacggaaatggtttcacctgatgatacagcacttctgatgtttacatctggaacaacgggaaacccgaaaagatgcatgattacacatggcggcatatacagatacgttaaaaaatccaacagctcaatagcacgtatgaagggccttcgttttctcgcgtgccatccgatttatcatacgagtgcgctcatttgcatcatgcttggaacgtttgcagaaacaacctttgtgtttacaaaggatcaagatcctgttcacatgctgaaggtcattgaagaagagaaaattcagaccgtgatggctcttcctgtgttttacacgtatttgcttgaggcgtgggaaacgcaccaaactgacttatcttcacttgttattttaatgacaggcggaacaaaagtgccgagcagcctaatccgccgctatcttgatattggcattccgctcgcgcatggctatggaagcactgaggcttggggcatcagcacatggacgcctgatatgggaatggataaagcggcatctgcaggaaaacctgtggcaggtgttaaagtcaaagtggaagatcctctgaccggagaagaacttcctcaaggagaaatcggcgaaatcgttgttcatactccattcttatttaaaggctatgaagacaatcctgaagcaacagcgaaagtgctgcaaaatggatggtttagaaccggagattcaggatatgtagatgaagatggctttattttcatcacgggacgctacaaggatgtcattatttacggaggcgataacgtctatcctgatcaggttgaagaagttatccagcagatcccgggaatccttgaaacggctgtggtcggtattccagacccgctttacggtgaaaaaccgaaagcttttatcgtgaaaaatggcggccagcgcatcacagaagaggatgtcatcgcattttgtaaagaacgcctgtccgcttacaaaatacctgaagttgaatttgttaacgaactgccgaaaaacaaccttggcaaggtgaaaaaagacgtcctgcgcaatcaggctgtacattcataaaagaagaagcccgtccactttatgtggcgggcttctttgcacttgcacagacggaaagctcaggcttaatgttcttaaattgtatatcaatgtcttcgaagccggctgctttaaagtcagcaatcatctgtcttccaaatgatttggttttttcaggactggcatccgcttcccgcggctgcatcgtaatggctgctttgccgcctggctttaatgcccgataaatctgtttcatgccttttgtttggtcattccaaatggtgtagttgttaacggaaatcactttatcataaaacgaggcggggagaggaaatgtctcgatgcttccttgtatcaggcgtacgccctttggtttcactctgcgggcggccagcttcagcatggcctctgacacatcaatcccatgaagatgaacatccttctcgcgtttcagcatctgctgcatgcagtatcccgggccaaacccgacttctaaaatgctgtccccgcgcgtgatacccagctgattgattgtccactgattcagtgtttgattttcagcagccatgatgtacccggcaatcatgccgatgacgccctttggcctgctgaatcttctagaaagcatgttaatcattcagcaaccaaccccctttttgagttaatttcctcccagcgttccatgtgaaacatttttctgataaagcaatgcgaaggtgccaagccatgtttatccatagagtgtgtgaggtacacaacaaatagacatgaaaacaaaggaggagaatcatcatggcaaattatccaaaagaactgccggcacaaactcaaagtcgccagccgggaattgaaagcgaaatgaatccaagtccggtgtatgagtacgaggattataaaggagcagacaaattaaaaggaaaagtagctcttattacaggcggcgacagcgggatcggacgcgcggtttccgtcgcttacgcaaaggaaggcgcagacatcgccattgtgtataaggatgagcatgaagacgctgagaagacgaagaaacgtgttgaacaagaaggcgtaaaatgcctgctgattgctggtgacgtaggtgaagaggaattctgcaatgaagcggttgaaaaaacggtcaaggaactaggcggccttgacatccttgtcaacaatgcaggtgaacagcatccgaaggaaagcatcaaagatattacgagcgaacagcttcaccgcacattcaaaacaaatttttattctcaattttatttgactaaaaaagcaattgattacctgaaaccgggcagcgccatcatcaatacgacatccatcaacccgtacgtagggaacccgacactgattgattatacagcgacaaaaggggcgatcaacgcctttacaagaacaatggcgcaggcgcttgttaaagacggcatccgtgtaaatgcagtcgcgccgggtccaatctggacgccactaatcccagctacgttccctgaagaaacagttgctcaatttgggcaggatacgccgatgggccgtcctggacagcctgttgagcacgtcggctgttatgtgctcctggcatcagatgagtcctcttacatgacaggacagaccctgcatgtcaacggcggaaactttgtgacgacataagagggagtgagacatatgagcatcacgaaagaagaagtgaacagctactatcaaaaagcagggattgtattaacggacgaggaagtagaccaaatccagctgatggattacggcttaggaaaagaaagaaaagtcgggctccagctcttcgtctacgtcaatacagaccgttattgttcaaaggaattggtgctgtttccgggacagacttgcccggaacaccgccatccgccggtcgacggccaggaaggcaagcaggagaccttccgctgccgctacggaaaagtgtatctttacgtagaaggagaaaaaacgccgcttccaaaagttctccctcctcaggaagacagagaacactatacggtctggcacgaaattgagctagaaccgggcgggcaatacacgattccaccaaacacaaagcattggttccaggccggggaagaaggtgccgtcgtgacggaaatgtcatcgacgagtacggataaacatgatatctttaccgatccaagaatataaggatgggcttaacagcccatcctttttgtattgaaaaaaacagaatcatcgctataatggttaaaaaaggaaagagggcgaggcaatgttcacttgcaaggtaaatgagcacatcaccatccgattattggagccgaaggatgcggagcggctggccgaactcattatccaaaatcagcagcggcttggcaagtggctgttttttgcggaaaatccaagcagcgctgacacgtaccgagaaacaatcattccagattggcggcgccagtatgccgacctgaacggcattgaggcgggtctcctttatgacggcagcttatgcggcatgatcagcctgcataaccttgatcaagtgaatcgtaaggcggaaatcggatattggattgccaaagaatttgaagggaaaggcattattacagctgcctgccgaaaactcattacgtatgcttttgaagagcttgagctgaatcgtgtggcgatctgtgcggctgtcggaaacgaaaaaagcagagcggttccggagcggctcgggtttctagaggaaggcagggcacgggacggcttatacgtaaacggcatgcatcacgacctcgtctactacagtctgttaaagcgtgaatgggaaggcgaaaaataaagagcacactttcttgtttaaatcttccccggatgtggaaaagtaacagcggagacgttaaaaaggagtgattcgagatgaatcagcaagacattaaacaaaaagtgcttgatgttctagatcaccataaagtaggttcgctcgcaacagttcaaaagggcaaaccgcattcccgctacatgacttttttccatgacgggctgacgatttacacaccgacaagcaaggaaactcataaagcagaagaaattgagaacaaccccaatgtccacattttattaggctatgattgtgaaggttttggcgacgcatatgtcgaagttgccggaaaagccaaaatcaacaattcggcagaactcaaggacaaaatatggagttccaaattagagcgctggtttgacggcaaggatgatccgaatctggtgattcttgaaattgaaccggaggatatcagattaatgaatgccggagagaaaacaccggtctcactcgaactataaaaaatttgtgttttcaggggcgatatgttattatgaatagctagtaagaaaaataagcaaataaaaaagaaagtaaacttcttttttctgttttgagagagaagcttaccgcttcccaagcagcataaccagctgcccttattcttttccttcataacaaatcgcccctaacgatgagatggaaaaaagacttttttgttttacaattcacaccggcgcggcttcggagccgcagtgacgattgagaggtagggctttcgttgtcttgtgttcaagaaatttccatggtgtttactttccagaatgattcttcggaacaatgctttatgaatctaacccgcctgacttggcggatgatataatctttatttgcgtatagaaaagaataagacaaaccgcccggcgtacgccggacggtttttttattgcaaaaaacacatcgtactgaaacctccttgtcttctttccagtcttatctctaggatgaaattggaggaagaataacgtgcatgtcattacaacacaagtactttttattttttgttttttattgctgattcactcgatagaaaccttagcctatgctacaaggctttccggggcccgcgttggatttattgcgtccgcgctttctctgtttaatgtcatggtcatcgtatccagaatgtcgaacatggtgcagcagccctttactgggcatttaattgatgctgctggaaaaaacgcactggcgattgtaggggagcagttccgctttttaattttcggatcgacagtcggcaccattttgggcattatcctgctcccgtcttttgtcgctcttttttcacgggcgattattcacttggcgggcggcggcggctccgtttttcaagtattccgaaagggattctcgaaacaaggattcaaaaatgccctttcctatttgcgtctgccgtccatttcatatgtaaaaggatttcatatgcgcttgattccgaagcgtttgtttgtcatcaacatgctgatcacatcgatttatacgattggcgtgctttcggctttatacgcaggccttctggcgccggagcgcagcacgacagccgtcatggcttcgggtttgatcaacggaattgcgacgatgctgctggccatttttgttgatcctaaagtatccgttctagctgatgatgtggcaaaaggaaaacgaagctatctctatttaaaatggacctctatcacaatggtcacatcaagggtggcgggcacactcctcgcccagctcatatttattccgggggcctactatatcgcgtggctgacaaagtggttttaataagaaaggctggatcataaagatccagccttttttgcattcccttatttatatttccttaatccgcggtcgtacaaaaaatttccgaatgggacgaaagcagcgacgaagccggcagctgaccatttcagcggccatttgacagagaaggttgcataagccaagacaagcaaatacaaaatgaacaacccgccgtgaaccgaaccgacaattgtcaccgcaagcggaaggcctgcccaatatttaagcggcatagcgatgaacaacaggattaagagtgacattccttcaataaaacccatcgtgcgaagtcttccgatcggcgtgtgcagcataaatcgccctccttgtggacacgttttcattttatactataaacaatccggaggggcatatgacagctttcaaaaaatgttcggaaaacattcatttttacatgccttttctagggaactgtacttgtcatttacaaaaatacccgagataatgtgtacaaaatcaaaaaagaaggatgttgaaatgaaacttgaccagattgatctgaatatcattgaggagctgaagaaggacagccgtttgtcgatgagggaattaggcagaaaaattaagctgtcgcctccatctgtgacagaacgggtaaggcagcttgaatcgtttggcatcatcaagcaatacacgctggaggtcgaccagaaaaaacttgggcttcccgtttcctgtattgtggaagcaaccgttaaaaacgcggattacgagcggttcaaaagctatattcaaacattgccgaatattgaattttgctaccggattgcaggtgcagcctgctatatgctgaaaatcaatgccgaaagcctcgaagcggtagaagatttcattaacaaaacatcgccctacgcgcaaaccgtcactcacgttattttctcagaaattgacacgaaaaacgggcgcggttagagagtgccgcgtgaagtctgttataataacaggatgagcgcgaaagaaagagaagtgatcaagcatgtcaaaaacagttgtattagctgaaaaaccttcagtcggccgggatttagcccgggtgctgaagtgccataaaaaaggaaacggttatctcgaaggcgatcaatatattgtgacctgggctttaggccatttggtgacgcttgctgatccggaaggctacggaaaagaatttcaatcatggcgcctagaggatctgccgattattccagaacccttgaagcttgtggtgataaaaaaaaccggaaagcagttcaatgcagtcaaatcccagcttacccgtaaagacgtcaatcagattgtcatcgcgactgacgcaggccgggaaggtgagcttgttgcgcgctggatcattgagaaagcgaatgtccgaaaaccaatcaagcggctgtggatttcatctgtgacggataaagcgatcaaggaaggttttcaaaagctgcgcagcggcaaagaatatgaaaacctgtaccattctgccgtcgccagagcggaagcggattggcttgtggggatcaacgccacccgtgcacttaccacaaaattcaatgcccagctctcatgcgggcgtgtgcagactccgacgcttgccatgattgcaaagcgcgaggcagacattcaggcgtttacgcccgttccgtattacggcatccgtgctgcagtcgacggcatgacgctgacgtggcaggataagaaatcaaagcagacgagaacgttcaatcaagatgtaacaagccgtttgctaaaaaatctccaaggaaagcaagcggtcgtagctgagctgaaaaaaacagcgaaaaaaagctttgcgcctgcgctttatgatttaacggagctgcagcgtgacgcccacaagcgcttcggtttttctgctaaagaaacgctttctgtactgcagaagctatatgagcagcataagctcgtcacatatccgcggacggactctagatttttatccagtgacatcgtcccgacgttaaaagaccgtctggaaggcatggaagtaaaaccgtatgcccaatatgtcagccaaattaaaaaacgcggcattaaatctcataaaggatatgtcaatgacgcgaaggtgtcagaccaccacgcgattatcccgaccgaagagccgctcgttctcagcagtctgagtgataaagaacgaaagctgtatgacctgattgcgaaacgtttcctggctgtattaatgcctgcattcgaatatgaggaaacaaaggtcatcgcagaaatcggcggagaaacctttacggcgaaaggcaaaaccgtgcagtcgcaagggtggaaagccgtttatgatatggcggatgaggatgatgagcaggaggatgacagagatcagacacttcctgcgcttcaaaaaggcgacacacttgccgtccgcacgttaacggaaacaagcggccaaacgaagccgcctgcccgctttaatgaaggaaccttgctgtcagcgatggaaaacccaagcgcgtttatgcagggagaagaaaaaggcctcgtcaaaacgcttggagaaacaggcggcctcggcacggtggcaacgcgtgccgacattattgaaaaactgttcaacagctttttaatcgagaaaaaaaaccaagatatttttatcacttctaaaggaaaacagctcctgcagcttgttccggaggatctgaaatcaccggccttaacagcagaatgggagcaaaagctgtctgcgatcgcggccggcaaattgaaatcggctgtttttattaaagatatgaaggcttacgctcaccaaacggtaaaagaaatcaaaaacagcagccaaaccttccgacatgacaacattacgggaacggcatgtccggaatgcggcaaaatgatgctgaaagtaaacggcaaacgcgggacgatgctcgtgtgccaagatcgtgaatgcggaagcagaaaaacgattgcccgaaaaacaaacgcacgctgcccgaactgccataaaagaatggagcttcgcggccaaggcgagggccaaacctttgcgtgtgtgtgcggtcaccgtgaaaagctctctgtatttgaaaaacgaaaaaacaaagacaaagcgcgtgctaccaaacgggacgtatcctcttatatgaaaaaacaaaataaagatgagccgattaacaacgcgctggcagaacagctgaaaaaactcggtttggataaataataaaaaaacctgtgcctatcgcacaggttttttattggacttaggtcctgttttcttaatgttcaaaaaggggaaaaaaagctagcaatctgcatttttttcttttatagtaaatgtactttgtaacatggcagtcatattttcgtctataactatttgtgagcgtctgatttgcttcaggcgacaaagggggatttgcctgtgaggcatgtactaattgctgtcatcttattcttcttatctatcggactttccgcagggtgtgctgaagctggaaacaagacccaaaatcagtcggcgacagaagtgaatgccagcccgctccagccggcggaatatttcatctatcacaatttaatgaatgacaaagggctgatcaaaaccgatttttcagaccagccttcttacttgtcggaatctctcggactgtggatggagtttctgctcagcaaaaatgacgcaccacatttccaggatcaatatcagcatctgactgattcatttctgatgagcaatcacttggtgacgtggaagattcaaaatggccaagcgagcgggacgaatgcgctgatagatgatatgagaattatgctgtctcttgaccaagccgccgcaaaatggggccgcagcgactacgcgcaaacggctagggatatcggcacgtctttgaagacatacaatatgaacaacgggttttttacagacttttacgactcacaggccgcttcaaaggatgtgacgctttcatacgtcatgcctgatgccttagctgtcttaaagaagaatggaatcatagacgaagaaacagaacagcggaatgccaatgttctctattcagctcctttaaaaaatggctttctgccgaagacatacagctcggagacgaaggaatacacatatgatagtgaaatcaacctgattgatcagctttacgctgcttggcatttgccggaaggggatgaaaaagcatctgttttagcggactggatcaagcaggaatttcagaaaaacggaaagctgtacgggcggtattcggcagatacgaaggagcctgccgtccaatatgagtctccatccgtatatgccttagccgtattgtttttgacaaaacagcatgaaaacagttctgtcatcaaagccatatatgacagaatgaatgactttgaaattcatgatccggtgaaatcgtattatggaggctatatgagcggcactcagacgcattcatttgacaatctgctgccgctgttagccgaaaggaagctttttaatgaaaatatcattcagtgaatcacaaaaattatttgcttatttttcagggctcatcgcggccctgtctttgtttatttattatgtgtcagcccagcaatcagaaggtgctctgatccttttcatcacatttggcgtcatcgccgcaggcatctggttcggcccgatttacgcgctggcagtgaccttaatcgtactctttgttctcggcaccttaatgatgtttttccagactggacagacatcgctctttccggctgaggaagggctgcgaatgcttgtcgtgtggggaatcgcgcttttgctgttttcttttatttctggaagaatccacgatattacagcagagcttcggcgctcaataacacggcttcaatccgaaatcaaaagctatgttgctgttgacagagtgactggttttgataacaagcaaaggatgaatctggaactttcagaagaaatcaagcgggcggagcgctacggcaattcttttgtgtttttgctgctccatatgcattatttcaaagagtttaagtctttgtacggtgaaaaagaaacggaccgcctcttccaatatgtcggtcagcaaatcaggacaagcgttcgggaaacggataagaaattccgtccctctgacgagcgtatcgggatcgtgctgacgcacacgcctgctgaacatatgccggccgttctgaccaagctgaagaaacaattggatacatatcagctggaaaatggaaagtatgtgtcgcttacgttccacgtttgctatttgccctaccgcaacgatatcaaaacagctgatcaatttttagaagaactggaaaacgagatgatgatgaatgaactataaaggaatcacattgctatgcgtcatgatgcttctttttttagctattgcgtcttttcccgtttctgcgcaagcgaaagatcaggatgccggcattctcatcatctactcaaccttggacggcaaagagtcgtcacaagtcaaaatgctcgatttgcttgcgggccactttacatcccatgtgacagtcaaaaaagattcagacgttgaagcgtcggatctcaaagggaaagaccatgtgatttattacggccaaacgaaaagaaagctcagcaaaaaattgctgtctcttatcagcggcgtaaaaaaaccggttgtcgccattggctataacgcaggccaaatcagccaattttccggtctttcattagcccgcaaagaaaatgtgtttcaggttcacagcaggtcggaaaaggccgatgtgtctctggaaagcgggcttaacgtgctgagtgtatcaggcctgaaaggaacggcgctttacaccttcaaagccgatgacggcacaacgcattcttttatatggaaaacaaaaaaagggaatgtgtacattggattaacaaatttgttaaatgacaatttgatcgtggcgaaacagctcagagaagctttcggagagaaggcggggacgacgttattgtatttgcgtctcgaggatatcagcccgatgtctgatgaaaaattgctgcttcaagccggtacatacctgcataagcggcatattccttttatcctggcggtcattccggtttatttgaatccggaaacaggcgacaaagtgtatttgtctgatcaaccgaagatggtcaaggtgctgaagaagctgcaaagcatgggcggcagtatcattgttcacggctatactcacgcttatcgctacagtgaaacaggagagggctttgaattttgggatgcaaaggcggatcagccgattacatccggaaatgccgaagaccccccgtccattttggagaaagaacaggacttcccgaacgaacaagcctatcacagctatctcgaaccatttcgggaaaaggaagaaacgtatacaaaacaaaaactgacgcgtgccattgaggatttgacatcatcgggtctttacccgctggcgtttgaagcgccgcattacacgatgtccgaatatggctatcaaatcgcctcgcagtattttacaagcattttcggccaggtccagctcagcagcacaacatggaaaacatccggtgcacctccgtttgtgactgctccttcgatgttgcacggaatgacgctttatccggaaacgatcggctttgtcgacacatcgaagcaaaactcgctcggtgagatggaggagcacatctcccagatgattgattttgaaggcggagtagccggaggattttatcacccgtacctcgggatgaaatatctgccggagctggttgatcagatggaacgcattccagacagtgaatggcttgatttaaagaaaacgaaacaaaccgtcaaaacagacaaagtggaaattcatacaagcggtgacggaacgattcaggtgaaaaacggcgtaagcgcgattgacgagtttttcgatcatcaccggcaaacccctctggaaaaggcgttatggattctctccgctgttgtgctcttatttgtcatcatgtttgtcagttatacgttttacttgagagccacattgaaaaaacgaatttttaaggagagaagaagccttgggtaatacgctgttctttatctcgctaagtttaatatgggttatgcttctctaccacatgttcctcatgcagggcgggtttcgccactatatgaccttcgaacggaatatcccgaagtggagagaaaatatgaaggaactgccgaaggtcagcgtcctcatcccggcgcataacgaagaggttgtgattcggcagacgctgaaggccatggtcaacctttattatccgaaggaccggctggagattatcgtcgttaatgataattcatcagaccggacgggtgatatcgtcaatgaattttccgagaaatacgatttcatcaaaatggtgattacgaagccgccaaatgcaggaaaaggaaaatcctctgcacttaactcgggttttgccgaatcgaacggcgatgtgatctgtgtgtatgacgccgacaacacgcctgagaaaatggctgtgtattaccttgtgctcggcctgatgaatgacgaaaaggcaggcgccgtggtagggaaattccgtgtcatcaatgcggcaaagacgctgctgacgaggtttattaatatcgaaacgatctgttttcagtggatggcccagggaggcagatggaagtggttcaaaatcgccacgatcccaggcaccaacttcgcgatccgcagaagcattatcgaaaagctcggaggctgggatgacaaagcgctcgctgaggatactgagctgaccatccgggtatataatctcggctatcacatccgctttttccctgccgccatcacgtgggagcaggaaccggaaacatggaaggtatggtggcgccagcgcacccgatgggcgcgcggcaatcaatatgtcgtgctcaaatttttggcgcagttttttaagctgaaacgaaaacaaattatctttgatttgttttattttttctttacgtacttcctgtttttctttggcgtgatcatgtcaaatgcgatttttgtagtgaatttgttttatgatttgcatttgtctgttggatttttggcaatgattctctggattttggcgtttttcttatttatgacagaggtcatgattacgttgagcattgaaaaaacagaaatgaacaagcaaaacttttttatcgtatttctcatgtacttcacatactcgcaggcatggattgtgcttgttatctactctttattcgtagaaatcaagcaccgtttattcaagcaagaggtcaaatggtacaagacagaacgatacaatcaacataaaagcgggtgacctttttgaaacaaataatgatttttctcacaagcttcatgctgctggcgatgactggacaaacggctcttgccaaagacgtacaggtcagcggttcgctcctcgggaaaagcagccaagaacaagccaaacagcaggtgctgacaagcgagttgattacactgtatggatcaaaagacagcgcagagctgacgtaccagatcccggcaggcgcctcttcgggcaatcagcaattggtaatcgaatacgaggcatcaaatcttttaatttctccatcatcgttaacggctgtcattgatgatgaaccggtcaagacgttaaagcttgatggtgattccaaacggaaaacagtgaagctgaatctgaataaaagccagtctgcgcaaggctatcacaacgtatcgctgaaattctacggcgtaatgaaagagggcgtgtgcgtcagacaggatacatcaggcaactggatcaaaatttatccggacagccggctgacacttgctgacagcagtgaagcgaagggaacgtcgctggaccattatccgtatcctttcgcccaatctggaaatacagcggaagaaacagctatcgtcattccggataacccaagttcagcagaaatagaagctgctgttaaaacagaaggctatttgaaaacggtggacagcagtgtcagtattgcgtatgtcacggaatctgaactgaaaaaaatcgataagccgacgattgttatcggcgtggacaagcattggaacggcaaagtgaaaaaactgttgaaacaagctgggctacaggcaaaaggagaaaaccttctgcttgcggagcgggtgctgaaagcagagggcaaacagcagccggttctgtttgcgcaagcggcgtccgaggacgcgctcactaaaaaaatcagcgtgatgacagatcagacatatacaggccagctcagcggcgatacactttcaatcagcaagcttcagcagactgaaaaaaaagaaagcgataagctgacccttgagaattttggagcgggtgatatcacaattggagccgacaaaacatcttcagcacattatttttatccggcttcggctgttttagatgaaaaccaatcggcgaagctgtcgcttaaactgaaaaagtctgaaacgattcaagcctcagcgactgaaaacgagtctgcctctcaggccgcagaactgaaagtgatgatcaacggccagccgcactcggtccgacttgatgaattaggaaaagaagataaaaacggattctatcatgtcacagtgaaagtggaccctaaactgctgcaaaaaaaccgctacattgatattcagttcgtcacgaccggcttaaaggaaaacaacccttgcaacaccactgatgaggaaaagtgggtttttatcgataaaaacagtacattatcatacgccatcaaaggcatgtctccgtcagcggattttcaagagtggccgcttccttacgccggaaaccaggatcaaacaacattaatcgtgcttcctgacaccgtaagccaatcgaagcttgaggagctttctctcgtaacggaatcctttggcagcgaagcacagcattcatatacagtaaagaaatcatctgacgttacagcaaaggatgcgaaaggacgaaacctcattttcataggagggatcaatcaattttctcttctgaaggagaaatcatcagatctgcttgtgccgcaggagaagaacggctcgtttgatgtatctggtttcgagatgctgaatgagacgacaaaacaagtggtatttacccaagcatcggtttgggattcacgctatacaatggcagtctttgcaccgtcaaaaggagatggaacggctgtcacaaaagagatcatcagttatctgaacagcaacgatgagtcggcaaccgtccttaatgaaacaaacagccagcaggtgtttacaaaccaccagcagctcaaatcggaaacaaacagttccgatgcagaacaaccaacacaggatcatagccagaaatggatgtatattggtgtgctggcactcattatggtggttgcggcagtgttcatttggattgccgtaagacgcagaaaaagaaagacagatacagaataaaacagaggctattttagcctctgtttttttatttttggtaagtaaattccatttgtggaacctgtcattttatttttttctctcagccaataagcctctttacaacgtgcgggaacgggagtatgatctcttttagaaaacaaatcgcttaatctgaaatcagagcgggggacccaatagaacggctttttgccgttggggtgaatcctttttaggtagggctaactctcatatgcccgaatccgtcagctaacctcgtaagcgttcgtgagaggagatgaatgaaacctgtgttcgatgttatggcacaggggcatccgtttgcctctgtgttttttgttgttcatttttgaatgcaaatcgcatacagagacatcatagcagaaaggactatcatcaacatgtgagagcaagacactgatggatgttttattgttttaattgaaaaatgagaaattaaaaggggaagacatcgatgtatcattcaatcaaacgttttttgattgggaaaccactaaaatcccaagcagctggagagcaaaaactgacgaaattaaaagccttggctatgctttcctcagatgcgctatcatctgtcgcatatgggacagaacaaattctaatcattttggcaacaatcagtgctgccgcattttggtactccattccgattgcggtgggcgttctcatcttgctgctcgcactgattctttcatacaggcaaattatttacgcttatccgcagggcggcggggcgtatatcgtttctaaagaaaatctcggtgaaaaaccgggattgattgcgggcggttcattgcttgttgattatattttaacagtagcggtaagtatttccgcaggcacggacgccatcacgtcagcctttcctgtattgcatgattatcatgtgccgatcgctatttttctcgtgttagtgattatgattttgaacctgcgcgggctttcggaatcggcatccattcttgcctaccctgtttatctgtttgtggtggcgcttttggttctcattgcagtcgggttgtttaaacttatgacaggacaaatagaccagccagcccatcatacaccgctcggcacacctgtagccggcattacgctgtttttgctgcttaaggctttttcctccggctgctcagcgttgaccggggttgaggccatttctaatgcgattcctgcattcaaaaacccgcctgcgcgaaacgcggcaagaacgcttgcgatgatggggattttgctggcgattctgttttccggcatcacggtgctcgcgtacgggtatggtacggcgccgaagcctgatgaaacagtggtttcacaaattgcgtccgaaaccttcgggcggaatgtgttctactatgtcatccaaggtgtcacatcgcttattttggttcttgcggcaaatacgggattttcagccttcccgcagcttgccttcaacctggcgagagaccagtatatgccgcgaatgtttacagtcaggggcgaccgcctaggcttctcaaatgggattatctttttaggcgttgcttccattgtgctcatcctgttattcgggggacagacagagcacttaattccgttatatgctgtcggcgtatttattccatttacgctttcgcaaaccggcatgtgcatcaaatggatcaagcaaaaaccaaagggctggatcggaaaaatgctgatcaactcttgcggcgctttgatttcgtttatggttctgtcgatcctgtttgtgacgaagtttaatgttgtatggcctgttttaatctttatgcctatcgtcgttctgttgttttttgcgattaaaaatcactacaccgctgtcggcgaacagcttcgcatcgtagacaaagagccggaagaaatcaaaggcaccgttgtgattgtgcctgtggccggtgtcaccaccgtcgtacaaaaatcgattcactatgcgaaatcactgtccgatcaggtgatcgccgttcacgtgtcatttgacagagaacaggaaaagaaattcgaaaaacgctgggaagagcttaataacggcgtgcgtctcgttacgcttcactcctcgtatagaagccttgtccatccgtttgataagtttttggaaacagttgaggcgaaagcgaagaaggagcagttttccgttatggtgctgtttccgcaatttataacgaaaaaacgctggcacaccatccttcacaaccaatcagccttcctcctcagagtccggctgttctggaaaaaggacataatggttgccacactgccgtatcattttaaaaagtaaagctctaggaccaagggaatcaccttggtccttttttgcggaaaaaggaggtatggcggtgtatacacaaggtgcttttgtgatcgtactgaacgaaagtcagcaggttctgctggtgaaacgaaaagatgtccctttatgggatttgccgggcggcagggttgatcccggggaatcggctgaggaagcggcagtgcgggaggtattggaagaaacgggatacaatgcagcgctttctgcgaaaataggtgtttaccaaaggccaaagtttcaagatgaacagcatctgtttttcggaagcataacaggcggacaagcagtggctgacggcacagagacagcgggattaaagtgggtttccccggagcgtttgccgctttttatggtgccgaaccgaaaaaggcagatcaatgatttcaagaatggcgctcaagatgtaaatgtcaccgtcaaggatagagggttgctcgcggcgatcgacctgttgaaaagaagactgggcaagtgattcaggtctccgggttttaaagcctttctcctgtggtattgaaaaaaggaaaaaggaggatacgttatggcacacaaaactgcaggacaagcaatgacagagctgcttgagcaatggggagttgatcatgtatacggcatccccggagacagtataaatgagtttattgaagaattaagacacgaaagaaatcaactgaagttcattcaaactcgccacgaagaggtagcggcactggcagccgcagctgaagcaaaactcaccggcaagatcggagtctgtctgtcaatcgcagggccgggagcggtgcacttattaaatggtttatatgatgcaaaagcggacggcgcccctgtgctggcgattgcaggacaggtttcttctggcgaagtcggacgggactatttccaggagattaagctggagcaaatgtttgaggacgtggctgtgttcaacagagaggtacatagcgcagaatcacttccggatctcttaaatcaggcgatcaggaccgcctacagcaaaaaaggcgttgcggtattgagcgtgtcagatgatttgtttgcggagaaaatcaaacgggagcccgtgtatacttcaccggtgtatattgaagggaaccttgaaccgaaaaaagaacagctcgtcacctgcgcccaatatattaataacgctaagaagccgattatcctggcagggcagggaatgaaaaaggcgaaacgggagctcttagaatttgcggacaaagccgccgctccgatcgttgttacactcccggcaaagggtgttgttcccgataagcacccgcattttctcggcaacctcggtcagatcggaacaaagccggcttacgaggcaatggaggaatgtgatttattaatcatgctcggaacgtcattcccgtaccgtgattatttgccagatgacacgccggcgatacagctcgattcagacccggcaaaaatcgggccttgtctgcgattcggctctcggtctgcgcgaattgacagagtatattgaacgcaaggaagacagaagattcctaaatgcctgcacagaacatatgcagcattggtggaacgaaattgaaaaagatgagacagaggccacaacaccgcttaaacctcagcaggtcgtggcccgtcttcaggaagcggcagccgatgatgcggtgctctctgtcgatgtcggcactgtgacagtctggatggcgcgtcatttcaaaatgaacgcgaatcaggatttcatcgtctccagctggcttgcgacaatgggttgcggcctgccgggagcgatcgccgcaagcttgtccgaaccggaacgccaggcgatcgctgtctgtggtgacgggggattttccatggtcatgcaggatcttccgaccgctgtcaaatataagctcccgatcacagtcgtcattttaaacaacgaaaatcttggcatgattgagtacgagcagcaggtcaaaggcaatatcgactatgtcacaaaacttcaaaatgtcgactatgccgcatttgcagaaagctgcggagcaaagggcatcaaagtgactaaagcgggagagcttgcgccggcattccatgaggcgctgcaatctgaccaaccggtcgtagtggatgtcatgattggaaacgaaccgccgcttcctggcaaaatcacctacgggcaggcgaaaggctttagcaagtacatgctgaaaaacttcttcgaaaaccaaaaatttgaaatgccgtcactgaagaaaagtttgaaacggttattttagaggcccttttagaggcctctttttttgtgttggaaacaaatgtatttcaggttatccttgtattatattggtatgaggaggattacatgtttgagttcataaaattattgttgtatgtattaggatctgcaggaatgatctatgcgtcatatcacgattttcgccatgctcagaacgggcaaaaggacaaatgcatcttctttcaaagcaaaaagaccagcgcatttgtccttgtatgtttcatttgtttattcttatcaaatctaacagagctcttctcagtatagggttatttctcttttttcttcagcccgaagaagaaaggaaaagcagaaccgaccaagaaggtgccgaataaaaacatgccgccgataaacacgtggaaatttgtgtgtccggccgtaaacgccgtgattagggaaataatactgagcacgatcatggcaatgccgggcgcgactctcatttttcccttggatttatgggcagcaacagaacataaaatgccgataacaataggaacaatccacaaataaaacagaataaatactgacatcatcaaaactccgatttttcttctatcataacaaatttctgtcaaaaagggtatcaaagagcttttgcgaaaaaataaaaaccggctttagaagccggtttttttatcgaaacgtatctacaattaaaaacacattcaaagcaacgatcaatacagcaatcagccaagacaccactgtgacccatttggcgttgatcagagatcccatgatccgtttattgcttgtaaacataataagcggaatgagggcaaaggcgatcccgaaggacagcacgacctggctcagtacgagagcggtcgtcggattaacacctgacgcgatgatcaagatcggcggaatgatcgtgataaaacgccgtacatacagcggaatgcggtagttgataaatccttgcataatcacgtcgcctgaaagtgtgccgacagacgaactggatagaccggcaacgagcagcccgatcccgaataaagccgcagacatagggctgacaagatgtccgaattgctgaaatgcgacgtcgagatcctcaacaaacaggccgtttttgaagaataatgcggcagccacaatcagcatacttgcattaatagcccctgcaatcagcatcgctattaaaatatcaataaattcaaacctaaagatttttttccgttctgcatcagttttgccaaccacccgccgctgtgtaagggcagagtgtaaataaatggcgtgcggcataacagttgcgccaagaatacccgctgcaagaagcacactgtcggtgccatgaaacgccgggacaaaaaggcccttcatcactgacacggcatcaggctttgcgaaaaaggtctgcagcgcaaaggcgatcacgaccacaaacagcatgccggcaataccggcttcaagtgagcgataaccgcggcgctgaagctccaatatcgcgaaagaaccgatcgccgcaataatagacgcttcaagcatcggaatgccgaacagcaaatacagtcccagagccgctccgataaattccgccaggtcagttgcgataatgacaagctcgccctgaatccataatccgatcgagacaggcttcgggaattcttcacgggcaacctcaggcagatttttgcctgtcgcaataccgagtttggcggatagggattgaattaaaagggccatgatattagaaaataagatcacccataagagcatatatccgtatttagaacccgccgaaatattcgttgcgaagttgccgggatcaatataggcaatggctgctataaatgcagggccgagaaaagggagcagccctctgaatcctctgattttcccgtcaagcgcatcttggacggctttggaacggggagattgtgctgtgatgtccttgttcatcatgtctcacctgaattctgtttgtttttgccgtacaacaaagagtttccttaaggcaaattattttatctacatcatatgaccatcccggtttcttgtcaaccgaaaatgttcaaaatacacttctgaatttttccctgttatgtaacatgatatgtaggaattcgggataaggtcccatataaaaagacatcgtttcagttcgaaacgatgcctcctgtatctaatgagtctaggcttccttccgcagcccgcggaatataaggcccagcaagaacacgaagatggctgccccgatgatggccgggaaaatagcaaagccggcgaggctcggtccccatgtgccaagaagtccgtgcccaatccaagcgccgatcagcccggcaatcatagagccgaaaattcctcccggcagccggtttcctacaatggcgctcccaattaatccgataacaattgcaacaactaatgaaaccaaaaagctaagcatcatgatcacctctcataaatgatttaccaatcaataaccgctcctgatcatttcgaaacacttaaaagcatattcctttatgatcctgttttaatctttctctgcacactgccgtcagctaaatgaacaatgacctcagtgcctttatgcgccgcgatttcctttgcccgttcaatcgcttctttctttgtatctttgatttcagacacacgtttggcgccctcggctttgactgcccagccttttttatgcttaataacatgctctgctttattcatgagctcggggccgctgccgctgcttggatcagcatcgcgttctgtctcatcatcatgcgtcaggaaatcatcaatttcatctgtagaggcgttttccgcccattccttcgctttgcttgtcgcaattggaatcgcgcgcccttcctcatagccttcatcaatcatcgcattcgcaatgtctatcgccttttttctcaccggcttctcaagattttttaatgaagcaggataatccttcatcgaccaaggcatgtccatcactccttttccttttataaaaatggtacccgcaggtgaaaaataaaaacgcatccgaaaaaatgaaggtatactatatagtagaaaaaacggaagggaagtgcggattgggtgccaacagaacgaaaagaagacttacatcagcaattaaaagagatagagaaatgggaaaaagatcagcaaaaagtctggttttgggaaaagctcagccgtctcccgtttcaactcctggacaagctgacaccagaattcatccagaaaaagatcggcaagctcttggatgaggtcggcagctttgttcaaacaggcggacagtacctgacatctgaaaaacagattatcaggatatttcaaaagaaactgccggaggagatctttgaatcgctggaggacatccggaaggcgcctctttctgtcatggatgaaattgcggaaggaatgggcaaaaatagaaccaacgcagcaaccgttcaaggcgcgacaaccggtgtgggcggcgtgtttacgctggcggcagacattccggcagtgcttggcttatcactaaaaacattacaggatatcgcagtcgcatacggctatgacccaaaggagaaaaaagaacgagtcttcattgtgaaatgcctgcagcttacgtcggctgatgttgtcggcaaaagatcgattttgcaggaattaaaacactacgatcaagaccgtacatataagaatgtcgcttctcaaatccaaggctggcgagaagtcgttttgggctatcgagacacgtttggctggaaaaaacttttccagatggtgccggttgccggaatggtttttggcgccgctgccaatcgctcaacattaaacgacattaccgagacaggcatgatgctgtacaaaaagaggcgcattcttgaacgactgaaagaaacagaacgagagatggaatagcagaaagcagacggacaccgcgatccgcctgctttttttagtggaaacatacccaatgtgttttgtttgtttaaaagaattgtgagcgggaatacaacaaccaacaccaattaaaggaggaattcaaaatggcagacaataacaaaatgagcagagaagaagcaggtagaaaaggcggagaaacaacaagcaagaaccatgacaaagaattctatcaagagattggtcaaaaaggcggagaagccaccagcaaaaaccatgacaaagaattctatcaggaaatcggcgaaaaaggcggagaagccactagcaagaaccatgacaaagagttctatcaagaaatcggtgaaaaaggcggagaagccactagcgaaaatcatgacaaagaattctatcaagaaatcggccgaaaaggcggagaggcaacaagcaaaaatcatgataaagaattctaccaagaaattggctcaaaaggcggaaacgcccgcaacaacgactaatcaaaaacataaaggcagacaacctgtaaataaaaaagcgatccggcacatcagctggatcgcttttttttggaatcttctcaatttatgccactattgcgatacaataagtgaaaaaggggttttcgctaatgtccaagatgcaaaacttgctcgccatcgcaaatgaagtcaaagaaaagcacgccaatttttcaatctcagaggtcaacgaccactgcgtgcgccttgcggtgtttacgggagaatatgactggcaccatcaccctgactcagacgaattgtttattgttcttgaaggggagctgctgatcgattttaaggacaaagaaaccgcggtgctcaaagcaaatgacagcctgctgatcccgaaaggcacggttcaccgcacacgctcttacgtcagaacggtaaatctctgtgtggagcataaacaagccgaaaccgtcatcatagaggagcagccatgctaatcaaaaagatgatatgtgaagtagacgctgcaaacgctgaagcatttgcaaaagcgcagtcacagtgggaagcattatcgcatataagcggctttatcaaacaggccggcggctggcgaaaaacgatagacgagccgctcaccgcagaaatcatcagtgtatgggaaaacagagaagcctatgatcattttatggagaacgaacatgacagcatatacgaggaaaacgatcagaaggctgtaattctttcgatagaggtgacggtgtacgaagaggataaaccgttcgtttatgatctgttacataaccccgatatccggtacgaaccaaactggacggttctgaaggcataatcaaagcccaaaacatcatattttgggcttgtctctttactcgcgtcccggaagtgtattatgaacaaaaggcggtgctggttttaactccggtttttctccaaacgtttttgcttctttcacatattcaaaggcttctccgtccggcgctttttcattcagccagttttgctcggcgctttcttcgccttcagagaaattgataagctgatgtgagaactcttgtttttcgagcgctttcgggaatgtacccggcacaaccggaccttcctgtgcttctaattctttaatggcggcaagccattggttctggtgcattgtgtcacgcgccagcaggaagctgagcatatctttgacgcctttgtcatccgtcatttcaaacaggcgtgcgacctgcagacggccctgtgattctgcattcaggttggcgcggaagtctgccagcaggtttccgcttgctacgatataaccgccgctccaaggtacgcctgtactgctttccggcatggcgccaagtcctgatacaatcgcatggtgagggttcatgccgcctaggatggagccgatgaccggatcttcagcagctttttcctgctgatcaagaggggcattctcaagaagtctggcaatcatcgttgcgatcatttcaacatgcccgagctcctcagttgccgtatccatcagcaagtccttgtatttttcatttcctcttgtgttccagccttgaaataagtactgcatggcaactgaaatttctccgaattgcccgcctaaaatttcttgcatttttttagcgaataatggatctggacgatctggtttagcaggatgctgcagcatttttgtgtgcttaaacatgtacccatctcctttttcgattatctctttttatatttccgatcgatagaaagataaacgaaaaacagcgtatcgagatgggaactatgaatcttttcgcagctccaacagttcccggatcagctcccggccgaagatgggctcatactgccggtaaacagggtcaagacgcttcatccattcttgtttctctttatctgacagctcataaatatgtatagcagaattctttttgatttcttccagctgctccttgttcatttgttcggcatacgtttcattccactccgtcgtctccttcatcgcttcagtcaaaatgcgccttgtttctggtgtttgcgccttccagaagtgttcatcagtcatgacagcgtagccgagataaccgtggctgcttattgtcaaatagtcctgaacattataaaattttttagaatagatgtttgaaattgtattttcttcgccatcgactacattgttttctaacagctgaaaggtagaattgaaggattcctgatgaggtgttgcaccaagcagcttgaactgatcctcaatcacatcgctttgcataatgcgcagatgctgcccttttaaatcatccggtgttttgaccggcccttgatttgttgtgatttgcttaaagccgttcgtccaataggccagtccttttaattggtttttctttagagaatcaaacagctgtgtgccgatgcttccgttcagcccttttttggcggcgttgtaatctgtaaaagcatacggcagatcaagcactccccattcaggcgagagcatgccgagcttcgatgtggagggggcgataaattgaacatcgccgttttgcaatgcttcaatttcttcaatgtccgagtacaggcttccattgggaaatacttctatttttattttcccgcctgatttttcgttcaccagatcagcgaatttattggcggcaagcccttttggcgtattttcagcaaccacgtggctgaatttaaacacgatttgatcctgcaggccttcctggtcgtcatcataaacaatctttttattgcctgtatgatcatggaatccgataaataaagcggttgcaattccagcgatcatcagtgcgagacatgcaagcaaactcttcatgaaaagccctcccctatgttaaggataatgggggcaatgacattcgtaaagacctgaaaggagaagctgatgaacaaaaagaagctctcaatccgttggaaaatcacgatcttatcctatatactcgtcattttctcctttttgatcggcggcattgtgctcatcggcaacattcagcatacagaggagcgggagctgaaaaagcggctgatgaatacggcccggacggtgtcagagatgacagaagtgaaagaagccttggcgcgaaaaaaacaaacagaagctgttcgccatgcggttgaagaaatcaggatgattaatgaagcagactatattgtcgtcatggatatgaatcacatccgatatacgcatcctgtcagcacaagcatcggcaagaaatcagaaggtgcagacgaggaggcagcgtttgcggagcacatttatttctctgaagcaaagggcgagctcggcacggcggttcgcgctttttatccggttaaggatcaagacctgaaccaaataggcgtggtgcttgtcggaaaaacgctgccagggatcgctgacatcctgcttcatttaaagcgtgatatcgccttcatcgttgtgctgacactcggctttggccttgctggttcctttttgctggcccgccatatcaaaaaacaaatgtttcagcttgaaccccatgagattgtccgaatgtatgaagaacggacagcgacgtttcactcgatgaatgaaggggtgatcgctattgacaatcggctcgtcattacgatttttaatgaaaaagcgaaacagatctttgaagtgcagggggatctgatcggcaaggtgatttgggaggttctcaaggattcgcgcctgcctgaaatcgtggagcggaacaaagcggtttataatgaagaaattcgtgtcagcggaaaagtcatcatgagcagcagaattccgatcgtcatgaagaaaaaagtgatcggcgccgttgcgatttttcaggacagaacggaagcggccaagatggcagaggaattgactggtgtcagaaactttgtggaggcgctccgtgtccaaaaccatgagcatatgaataagctgcacacgatcgccggcctcatccagctggggaaatctgaaaaagccttgcagcttgcattccaggcgtcaactgagcaggaaaatgtgactgaatttctgcaccgctcgattcaaaatgacgctgcggcaggccttctattaagtaaaatcagaaggggaagagagctcggcattgctgttcatatagatgaaaacagcagtcttcagcaatttcccgagcatgttgatcagcatgatattgtcgtgcttttggggaatctgattgaaaatgccttcggctcatttgaaaccgttcaatctgaagacaaacgaattgacattagtatcgaacaaacagatgatatccttgctattttaatagaagataacggctgcggaattgatccggcacatatgcctcgcctttacgacaaaggttttacggtcaataaaactggcggcacaggctatggcctgtatctagtgaaacaaatcatagacaaaggatcgggcacgatagaagttgattcacatgcggggcaggggacatctttttctatcgtttttccaatgaagggggaggaagcacagcatggctcgtaaagaatggaaggttctgctcattgaagacgatccgatggttcaagaggtcaataaggatttcattacaactgttaaaggcgttactgtctgtgcaacggcaggaaacggagaggaaggcatgaagctgatcaaagaagaacagccggatctcgtcattctcgatgtgtacatgccgaaaaaagacggcatcaagaccttgcaggagatcagaaagcaaaagcttgaagtggatgtcattgtcgtctccgctgcaaaagacaaggaaacgatctcactcatgctgcaaaacggggcgattgactatatcttaaagccgtttaagcttgagcgaatgagacaggcgctcgaaaagtacaagcaatataaacaaaaaatcgaagcgaatgatacgctgtcccaggaacagctcgatgcgatcctgaatattccgcagcaggccgtacaggatctgccgaaagggttgaatcacttcacgatgaatgaagtcactgcttttttgaaacagcaaaccgcatccctttctgctgaagaggtcgccaaggcgcttggcatcgccagagtgacagccagacgatatcttgattacttagaaaaaaccgggatcatcaaattggacgttcaatacggcggagtcggccggccggtcaaccgctacgtgttaaaaggataaacctgagaccaaaaagaccaaaatgtccgttatgatcataaacttccccagacattatgaaaacgctatcattatagtaagaaagacacaaaaggcgaataggacagggggatgaaggatatgaaactgtttaaaaatttaacagttcaggtcataaccgcggtcatcatcggggtcattgtcgggctggtctggccggatgtcggcaaagaaatgaaaccgcttggcgatacatttatcaacgctgttaaaatggtgattgcaccaattattttcttcacaatcgttctcgggattgcaaaaatgggcgatatgaagaaggttggaaaagtagggggaaaagcgtttatctatttcgaggttgtcaccaccctcgcactcattatcggtttatttgtcgtcaatattatgaagccgggtgcgggtcttgattacagcaagcttgaaaagggtgatgtatcacaatacacgcaaaatggcggtcagggaatcgactggattgaatttgttacacacattgttccatccaacatggttgatgccttcgcaaaaggggacattttgcaggtcttattcttttctattcttttcggagtgggtcttgcggcattaggcgaaaaaggaaaaagcgtcattgatttcttcgacaaggtttctcacgtttttttcaaaattatcggctacattatgcgtgccgcgccaatcggggcattcggggcgatggcgtatacaatcggacacttcgggctcgattccatcaaaccgctggcaagcttaatgatgtctgtttatattacgatgttcctgttcgtatttgttgctttaaatatcatctgcaagctttacggattcagcctgtggaattaccttcgcttcattaaggatgagcttctgatcgtgcttggcacaagctcttccgaatcggtgcttcctcgtatgatggataaaatggagcgctacggctgttccaaatccgttgtcgggctagttattccgacgggctattcgtttaacctcgacggcacatccatctatttatcaatggcgactgtctttttggcacaggtgtttggggtagacctcagcatcggccagcaaattacgattatcctcgttctgatgctgacatcgaagggagcggcaggtgtgacgggaagcggatttatcgtccttgcctcaacgctgtcagcgctgcaggtcatcccgctggagggtcttgcactcctgctaggggttgaccgattcatgagtgaaggaagagccattgtgaacctgatcggaaacggaatcgccacgatcattgttgccaaaagcgaaaatgaatttgatgaagcaaaaagcgtagaggctgtggaaggcatgaaaaaaatgaaaacagcagtctgaaaaaagaacggcccatccatggggccgtttttttaattgtttaagaattattaaggtaaggacagagacctcagcatttttttgttatataatttacaaatggatactatattgaatgaaggacgtttgtcctaacaggagtgtataaatggccgctttagttaaattttttcagcacccgggagtaaggcgtttctccatctttgtcgtgttaactggtgtgttatatctatttaagagcatgatcaacttaatattgcttaccttcattttcacatttctaatggatcgtttggagcttgtcgtgcggcagtttgtaagccagttcttccgcgtgagccagcgggttgtcattacgtttctttacatgttgctggctgtgctgcttacagtcgggggctttgtgttttatccggtcgtcgcggcacagatccagcagctggtaaagcagattaaacatattgcgtatcatcctgacagcatccctttctttgatgagatcaccagtgtcttcggagatattaacatcagttcatatgtcaaagagggcttcaatgtagtgtatacgtatctggccgatatcagcacattcggcttgcaggtcgtgatggcgctcattctcagcatgtttttcttatttgagaaaaaacggctttctgaattcatggcgaaatttaaaacgagcaaactgagggtcttttatgaggagattgcttttttcggaagcaaatttgcaagaacgttcggcaaggtgctcgaggctcaatttatcattgcgctcgtcaactgtattctgacgtttatcgcgctttggattatgcattttccgcagctgtttgggctgtcgattatggtgttcttccttggattgatccctgtagcaggcgtcgtcatttccctgattccgctcagcattatcgcctacagcactggcggtggaatgtatgtgctctacattgttcttgtcatattcgccattcatgcgatcgaaacctatttcttaaatccgaagctgatgtcggcgaaaacagagttgccaatctttttcaccttcacagtactcattttctctgaacacttcttcggcatttggggtttaattatcgggattccgatctttgtgtttctccttgatattctggatgtcaccaacaaggaagataggtctaaaggtccccgagagaatagcgataaaaagtagtttaaaatcgaataatgagtgtgcctcgatctgccggcctgcctgttcagggcatggaattaagactcggaatcggagtttggcattgcttcgcacagtggtgaacacaacaggtgacaatgcctgtcatcattacagaaactgaaaagaacaaacagtcggagcaaacgctcatcatcggtttaaccaaacatttggaagcaacaaatgctataatacaaacagtgcctaatgttgggcactgtttattttttgtcgaaaaaggaggaaggctttatggctgagccgattttacatattgaaggcctcgataaaaagattgggtctaaacagattttaaaacagatcagcatggacgttatggagggcgaaatcatcggcctgctcggtccaaatggttccgggaaaacaacactcatccgtatcatcgtcgggctgctgaaacaaaacagcggaagcgtgacaatcagcggattccagcatgatacagagtttgaaaaagcgatggaagcggttggagcaattgttgagaaccctgagttctatccgtacctgacaggctgggaaaacctcaagcactttgcgaatatgcacaaaaaaatagcggatggacggcttgatgaagtggtagaacgtgtcgggctgacgtcagcgattcatgataaggtgaaaacctattcccttgggatgcgccagcgtctgggaatcgcccaggcaattcttcaccggccgaagcttctcattctagatgaaccgacaaacggactcgatcctgcggggatgaaggattttcgcaatcatgttaaggaactcgcagaaatggaaggaacagctgtcctgttcgccactcatttattgcgcgaggttgaagacttgtgcgaccgtgtcatcatcattcaaaaaggtgagatcaaagcggaagtcagcttacaaggaactgatcaaaccacagaaaaagcaattatagaagtgcagccgcaagaaaaagcgctcaattggcttacaggcaatcaatatcaagctgagagccaagacgggacgattgtagttgaggtggcaaaagaaaacataccggagctgaaccgatcacttgtcggacaagatctgaatgtattttccattacgccttacacgcagtcactggaagacgaatttataaaagcgacaacagctcatcaagaggagggagaagagcttgtctaaattaatttggaatgaacatatgaaactttttaatcggaaggtcactttggtttctcttatcctgatggctgtctttcaattcttcatggcattgatcattaaacggattgtcatcagtgccggaacagatgaaaacttcatcggctatttatcgtatacaccgagcctgaacattttgctgcaggctttaacgatcgtaattgcagcaacaattgtttcgatggaatttgataaaaagacgatcaaatttttgctcattcgtccggttaaacgccaaaaggtcttttggtcaaaattaatcacagtcgtgatggtcagcttctatttgtatctggcatactacattctcgcattattattcggtctcgtgttttttggcacatcggtgactgcggaatcaaagacattgctggtcaacaccttggcgctgatcgggtcaaactggcttgaagctgtaatgatgggattattcgggctgctttgttcttcgctgttccgcaacagcgcggtagcagttgttgtttcttttgtcgttttatacggagcgagtacacttgttcagctcatgaagttgtttgaaaacaagtggggcagctttttgctttttgcgaacactgactttacgcaatacagaagcggagagacagcgttgttttcaggcatgacgccattgttttcaattggaattctcatcatacatgccatattcttcatcgttgttggctggtggtgcttctgtaaacgggatgttcgggtctaaaggcaaggaatgacatttttgtgaaaaagctcacgtaaatcaatatcatttgatattttggtttatactaaaggtactgacggaggtgtctcgattgaggaactttattaccgctttaccgatcatattgctgcttggattctcatttgtgtctttcatgtttcagtttgaacatcttgtttatttcaggctcgcgcttgggttgttttctctcgtgggactgtacatgatatataaaatgaagacgggcatccgctattttatcatctatctgtatgccagctggattgtgttggccgcagtgaccgcttttgaagagccgattttctcaagctttttctttggcggcctggtgatgaccatgggttacctgacatatatgctgatttatctcggcatgaaacaagaccgggatgcaaatcctgtgtaatcgcgctgttcccttggggaacggcgtgtttttctatactgggcaaaaggttaacagttgcggaaaaatggcagggaatctataatacatattaaatttatcggaattaaaactggggggctgccggatgtcattatttatacaaaacgatcaacagcggcaatggatggagaaaatcggacggattgcggatgaatttcagcaaacagctgctgaagatgacgaacagggacgttttcctgcagagaaaatacaaaaactgcgtgatgctgggtatacagcattaacattgccggcatctcatggcggagggggcatttctgtttacgatatgctcctgtttcaagaacggcttgcacggggagatgcttcgacggctcttagcatcggctggcatttgagcgtgatcggggagcttggagaaggcaacagctgggatgaagacgtatttgcatttgttgccaaggaagtccaaaacggagccgtcattaacagggcggcgactgaagcgaaaaccggaagcccgacaagaggagggcgtccgggtacacacgccgtcaaaaaggatggcaaatgggcagtgaacgggagaaaaacctttacgacgatgtcacaagctctggattattttttagtaaccgcatggattgaagacaaacaaacaacaggcgtgtttctcattcataaagatgatcccggcttgtcgattgaagagacgtgggatatgatggcgatgcgggcgactgggagccatgaccttgtactgaacgaagtaatgcttgatgagaataagctggtggaactgcttcaagggcctcgtggagctaagccgaatggctggctgcttcacattcctgcgatttatcttggtgtggctcaagctgctcgtgactatgcagtgcaatttgcatctgagtattctccaaacagcttgaatggaccgatcaagaatgtcccggccgtacagcaaagaacaggcgaaatggagcttgaactgctcaatgccagacactttcttttccatatcgctcaattgtatgacgatccggagcggcgtccacacttgaccagcgagctcggtgcggcgaaacatatcgtcacaaacgctgcgctgtctgttgttgataaagcgatgagaattgtcggggccaaaagcctgggacgaaccaacccgcttcagcgctattaccgtgatgtgcgcgccggtcttcacaacccgccgatggatgacgccgtgatacacaagctggcagctgaagcgtttgagtcataaaaaaaagagccttaccggctctttttatgtattgttttgctcttgcagatttttttgatgcttgcggtcaattctgtcataaataacgttcatcagctttggattgcccataatcgcctctttgttttcctggatcagctgttggtaagttttcactttacgcttcggcatgctccggcgccctcctgacatgtttgtattcactttctaactccgtcagcgacaattcatacagatgacgctttgactttttgtatataccattctgtattaacagatgaatgagctgtttttttctgatttctgcagactgaggtgtcattgtgtcaccaacctccaatcaaacgatattgataatcattatcaattaacttcagtatacaatgtccgcaatagcctgtaaagatgaaaagagtcctattctttctccaatttacaaacattcaacaaatcgacaaaaagtttcccgggcaataatttgctgtcgaaatattccgcttcattgaacgcaccctgctatttttcatgttttgaaccatactatgtaatagaatggaggctggtattcaatggagcggacagaaaatctgaaaaagggagaaaaaggggcgctcctcaatatttttgcatatgtcatccttgctgttgtaaagctagttatcgggattctatatcattctgaagcgctgagagcagacgggttaaataatggaacagatattgttgcgtcagtagcagtgctgataggattgcggatttctcaaagaccggctgacagcgatcatccatacggccattatcgggctgaaacaatttcgtctcttgttgcgtcttttattatgatggcagtcggcattgaagtgttaatcggcggaggaaaagcgattgcgggcggcacaacggaaacgccaaatcttatcgcggcatggacggcgttaggcagtgctgtgtttatgtatggcatctatttatataacaaaaggctggcagcgtccattaaaagctctgccctgatggcagcggcaaaggacagcaggtcagacgcttttgtaagtgccggcgcgtttatcggtgttttttcgtcccagctgaagctgccgtggattgatccggtaacggcttttatcatcggcatcatcatttgcaaaactgcgtgggatatctttaaagacgcttcacattccttaacagacggcttccatttaaaagatcttgagccttacaaacagaccgtcggcaggatcgaaaatgtgcatcgcctaaaggatgtgaaagcgaggtatttaggcagtacagttcatatcgagatggtgattacggttgatccgaagcttacagtagaagaaggccatggagtggcggatgaagtagaagacaaaataaaacatgaacacgatgtcactcatgttcatgttcatgtagagcctgacgacataaaataaggctgtttaacgaattagcttatatgttcagataaaaattcagtcacttcttcaggcgttttggcattggcgctgtgaaggtgagctgttttttcaccgttcttgaaaataagcaggctgggaatgcccattacttggtatttttcagccaggtcaggaagctcgtccttattcagctcataccaatcgttttgattgtattcttccaaaatatcgccgatgaacatattcatgcgtgtgcagtctgggcaccaatcagcataaaactttacaatgatttctttatcggattgaatcagttcattaaattgttcgtttgttgtgatttttttcatatgtcacatctccttttcaatgccattttaatataaaataaaaaggaattacatacaaatgcattcaacatcagcatgcccaaaaataattagatcattttccggtgaaaatgataagatagtaaagatgaattgtagtgggggagtatccattgaaaacaagtctaggattagtgtacggaggaaagtcggcagaacataatgtttccctgcagacggctctggctgtaatcaaagcgctaaatactgagaagtttgatatacatccgatttatataacagaaaaaggcgaatgggtaagaggcgctcgtttaactgagcctgtttcaaatgtgaaaatgcttcaatttgagcaaggaggcagtgctttttctccagctgccctgaaccaggagatgtttccgcaggaagcgtcacagcaaaatgaagccatcgacgtcgtattcccgctcctccacggaccgaacggagaagacggtacgatccagggaatgctcgagctgttgaacattccttatgtcggcaacggagtgcttgcttcctcagccggcatggataaagttgtcatgaaacatttatttgctcaggccggccttgctcaggctaaatacgcagctttccttaagaaagactggactcgttctccgaaagaaagctgtgagcaggttgaacaggaattaggctacccttgcttcgtaaaaccggcgaacctcggctcaagtgtcggaatcagcaaatgccgaaaccgtgaagaactgcaaaaagcgtttgagcttgctttccaatatgaccgcaaagtcgtcgtcgaagaaggcattaacggccgcgagatcgaaatcggcgttcttggaaatgacgatcctaaatgctctgttgtgggggaaatcgcaccgaagacggatttctacgattacaaagcgaaatatgaggatggagatactgatctgatgattccggcgattgtgactgatgaggaatacgcaacaatcagtgatatggcgatcaaagcatttaaagcgatcgacggttcaggactcgtcagagcggactttttcctgacagctgacggcgaagttctgatcaatgaagtcaacacaatgcctggctttacacctttcagcatgttcccgctgctctggaaagaagccggagtggaatatgctgacctgattgaacagcttgtggagcttgcaaaagaacgccacgctgaaaaacaattgattaagcatacattctaatgaagaaggacactgccggtaaaagggcagtgttttttcccgtatatacaaaagaaagagagggaccttacttgattaagcgaacagtaaaaaacattgccgaaatggttaatggcacactaacaaatccgcaatatgaacaaacagtcattcatggagtggcaaccgatacaagaaaactggaacaacatcagctcttcattccgctgaaaggggaacgttttgacggccacacttttgtggagcaggcttttgaagctggtgtagcggctgttctttgggatcggtcagaaccaaatccgcccgagaatcacgccgtcattttagtggacgatacccttactgcacttcagcagcttgcaaaagcctatttgcaggagcttggcacgcgtgtcatcggagtaaccggaagcaatggcaaaacgacaacaaaagatatgattcacgccgtattggggacccagtaccgtgtccacaaaactgggggaaacttcaataatcatatcggtttgccgctgacggttttagcgatgcctgaaaatacggagatcgccgtattggagatgggaatgagcgccaaaggagaaattgacctcttgagccgactggcaaacccggatgcggcagtgattacgaatatcggcgaatcgcatatgcaagaccttggctctagagagggcatcgcggaggcgaagcttgaaatcattaacgggcttaaagaagacggagtgctgatttatatcggggacgaaccgcttcttcaaaatgcatacagctgccagacgaaaacgtacggtacgggagcgcataatgattatcagcttcaggatgtcagccagagtgaggaaggaacccattttacaatcaaagggataaaaaacacgttttttattccaatactcggcaagcacaatgtgatgaacgccatggcagcgattgctgcaggagcttattttggcatcacgcctgagggtgcggcaaaaggactgagcggcctaaaggtaaccgggatgagacttgaactcatcaaaacagacagcggcctttcgataatcaatgacgcttataatgcgagcccgacttccatgaaagctgcaattcaattgacagaaagcctcgaaggctacggcaaaaaaatgctcgtgctcggtgatatgcttgaactcggcgatcttgaagaaacgttccataaagagtgcggcgctgtgatcagccctgataaaattgaccgcgtctttacgtacggaaaactgggagcttttatcgcggaaggcgccctgaaacactttgagaaagaccgcgtcagccattacactgagaaaaaagatctcctccaagctgtgaaggaaaacgcatcaaaaggcgatttgattttattcaaagcgtccagaggtatgaagcttgaagaaatcgttaaagatttaatagagagcccgctttcgtaagaaaatattttgcgaaaaaacgcatattgcatcataaaataacatgatgtgcaaacactaatgtatgccggccgaaaattatgtatatctggccggctgcggctatgatacaatatatataggttatttcgcgatacgaacatattcgtccggacttttcatcgtgacccgaagttctccgctggattcttgggagcggatggagcagcagccggcatattcgagatgccgatctgcttctcatcttattgaaaaacaaatagtgtaatggtaagataaaacttaaagtaattcgggctttgtatacggatggatcctgtccttcttgtctaaagggcagttttataagtggtaaatcacgacattactgaaacagcaattagaaggagtttgaataatttgactataacgtttcaagattttaatttaagttctgatctcatgaaagcaattaatcgtatgggatttgaagaagcaacaccgattcaggcacaaacgataccgctcggactttcaaataaagacgtcattggacaagcgcaaacaggtacaggtaaaacagctgcgtttggtataccccttgttgaaaaaattaaccccgagtctcctaatattcaagcaatcgtaatcgcgccaacccgtgaattagccattcaagtatctgaagaattgtataaaatcggacaagataaacgtgcgaaggttcttcctatttacggcggacaggatattggacggcaaatccgggcgttaaagaagaatccgaatattattgtcggaacacctggacgtcttcttgaccacatcaaccgccgcaccattcgtttaaacaatgtaaatactgttgtaatggatgaagcggatgaaatgttgaacatgggattcattgatgatattgaatctatcctttcaaacgtgccaagcgagcatcagacacttctgttctctgccacaatgcctgcgccgatcaaacgcattgcagagcgctttatgactgagccggaacacgtaaaagtaaaagcgaaagaaatgacggtttctaacattcagcagttctatttggaagtgcaagaacgcaaaaaattcgatacactgactcgccttcttgacattcagtctcctgagcttgcgatcgtattcggacgtacaaaacgccgtgtcgatgagctggctgaagccctgaaccttcgcggatatgcagctgaaggtattcacggtgacttaacgcaggcgaaacgtatggttgcgcttcgtaaatttaaagaaggcgcaatcgaagttctagtcgcaactgatgttgccgctcgcggacttgatatctcaggtgttacacacgtatacaacttcgacgtgcctcaagatcctgaaagctacgttcaccgtatcggaagaacgggccgtgcaggaaaaacaggtatggcgatgacgttcattacaccgcgtgagaaaagcatgcttcgcgcaattgaacaaacaacaaaacgcaaaatggaccgcatgaaggagcctacacttgatgaagcgttagaaggccagcagcaggttactgttgaacgtcttcgcacgacaatcagtgaaaacaacctgaacttctacatgacagcggcagctgagctgcttgaagatcatgatgcagtaacagtggttgcggcggctatcaaaatggctacaaaagagccagacgacacaccggttcgcttaacagacgaagcgccgatggtcagcaaacgctacaagaaccagcgctcttctaaacgcagagacggtcaaggcggcggctaccgcggcggaaaagggaaaagcaacaaccgttcttcctatgacaaaaagcgttcaaacgatcgccgttcttcaggtgacagacgccagaaaaaatcttactaatttgatcgattcagagcccaaaacatgatgttttgggcttttttatgttcgcgatttgttattcagcaaattttcagctgacggaagccatttttctctgtatgcttaagaatgaaacctttctgtaaaagagacgtataaataacgacgaaaaaaagggaggtaggtatttttgagagagcagccaaaaaaccaaatcagtccagacggattaaaggtttggcgacttcaagagatcatcatatccgctgtttgcttacttattgtcattgcagttgcagtgttaagctattattttcattggccgtactggatcagcggcgtgctcggcgcggtttggctgttgggatcgattgtgacggtctttatcattccgaaggtccgtcataaggtgtggcgatatgaagtccatgaacatgaaatagatattcagtcaggtatttttgtggtaacacgtgtgattgttccgatggtcagagttcagcacgtcgatacgtcacaagggccattattaaaaaaatacaacctggcaacggtgaaaatttccacggccgcgaccgttcattcgatccccgctttagagatggaggaagcggatcggctgagagactccatttcccgtctggcgagggtgactgacgatgatgtctgaaccgaaacgcctgcacccggcagcagtcattttgaatttatgccataccattattcaaacgataaaaaatatcattctgccattcttttttgtgtatattgtcaattcaaaccatactgtccgtttttacggagccattgcgctcggtgtgctattcatctggcttgtagcggcaagcattatcaaatggagaaggtttacctatcgaattgaagatgatgaatttagaatcgaagaaggcttatttgttacgaaaaagcgatacatatcgattgatcggattcaaacgatgaatacgagcgcaggccttgtccagcaaatctttaagcttgtgaagctgcaaattgaaacagcaggcggaggcaaggaggcagaagccgttctttctgctatttctgttgaagaagcggaacgcatcaaagaagctgtctttaagaaaaaagcgcaaagacgagaaaatgaacttgatgaagaacggcttgaagctgaagaggagttggttccggccgttgaggtgcaagagcactatcgcatgaacgcgaaagaattgctcatggccgcttctacctccggcggaatcggagtcattatctccgctgtatttgcacttatttcccagcttgatgaagtgctgccaatggattggttattcgataagttttccttccttcagcacgccagcatcggtatttacgcggtactgatttttatcggtttatttatcgcctggattttcagcatcgcgggcatgatgtttagatacgcgaactttcaaatcataaaaaaagagcaggaactggtgatttcaaggggaattattgaaaaacatcaagtcacgattccattgcgaaaaatacaagccattaaaatcaaagaaaatatcattcgccagcttttcggctttgtaacggtgtccatcgtcagcgcaggaggcggcgaccgggaaaaagaagaaggcgctttgaccattctctttccaatgattcataaaaaaaagcttccgcacatgctccgaacatttacgccggaatacacgctggaagaaaactgccgccgcctgccgcggcgcgcgttgaaacgctatttgttccgttctgtcattttttcactatttttgatcatcccgttatgtatcttctttcagccatggggctatctgtcagccatcctgctgccgatagaattgttcttcggctatctcgcgtataaagaggctgcatggacgatcaacggggaccgtcttcagctgacgtctagatttataggcagaacaaccgccattgtactgaaaaaacgaatgcaggtctgcaagttcagccaatcctatttccaaaagaaaggccgcttgtataccatttctacttcggtgaaatcatcgagccatatggaagaattaacggtgagggatgtaggtgaagaggatgcagccttcattttaaactggtactcatatgaaaaagcggacggttaataccgccgctcttttttttgcacgcataaaaacgaaagaagaaacccgccgcatagtccaaacagatgggccatcatgttaatattggagttgataaacgacatgagaacggcaaatgcgagcagtgtgatgatcattttggaatgctcctgccctattagttcattgcgaaaaagaaccataaacaggtacacgccgaatagcccgaaaattgcgcctgaagcaccgacatgcacgtaatcaagcggctctgtaacataagtgccgatattgccgatgatgccggagccggcgtatacaagaagaaaacgcgcttttcccagcatgcgttccaaagccggggcaaataaaaagatggacatggaattaaacagcagatgtgtgaaaccggcgtgcagcaaaatcggtgtgatcagccgccaccattcaccgtttgcgacacctagattatagcctgtgacggtatccctccataacacaactgaatgggcaggaagtgaaaaaaacagccagagaacagcttgcaaagccaatataaaggtgacaacggggtaaagcctgataaatgtttgaaaattttcagtccgtataaacattccgagccccttttcttcattttggtatatctatagtaacacgtttatgagacaaaccatttaaatagtacgtacgcaaaggaggttatcatacatgatttacggcattgggctggacattaccgagcttaaacggatcgcctctatggctggacgccagaaaaggtttgccgagcggattttgacgcgaagcgagcttgaccaatactatgagctttcagagaaaagaaaaatcgaatttctcgcgggcagattcgcggcaaaagaagctttctcgaaagcgtttggcaccggcattgggaggcagctcagctttcaggacattgaaattaggaaagaccaaaatggcaagccctatatcatttgcacgaaactgagccaggccgccgttcacgtatcgatcactcatacaaaagaatacgctgccgcgcaggttgtgattgaaaggttgtcaagctagtctgcatattagggaaaccccactcatatatttgatagtgcattaagggagacaagttgtttgaggcttttatggtacgcatctgttctgcctaaacgtgtaccgagcgtaccgttaaagtcaaacaagcgatttcttccttttacatcaattgagaaaaaggggttgaaaaaggtgagaaaaagctttgttttgcttttaacgggactgcttgctgttcttattctttctgcctgcgggcaaaaaacacagcaagatattgtggccgggttagatgaaaaggcgaaagaatacacctcgtacaaagcaaaagcgaaaatgaccatcgagacagggagtgagcctcaagtatacaatgtggaaatctggcacaaaaagccgtctctgtacagggtttatttagaaaatccgaaaaaggaccaaaatcaagtcattttacgaaatgaaaacggagtattcgttctcacgccgtctttaaataagagcttcagatttcaaagcgattggccgaacaacagcagccaggtttatctgtttgaatcgctcgtaaaggatgttcaaaacgattcggatgcagttttcacagcgaaagaaaagaaatacgtattcgaaacaaaaacaaactatcagcataacaaaatgctgccgacgcaagaaatcacatttaacaaaaaagatatgagcccgtcatctgtcaaagtgatggataccgaccggaaagtgatggtcaaagtagaattcagcagctttgaatttaataaacaatttgataaagaatcatttgatgaaaagaaaaatatgaccctttctcaaatggatgtcgccacaagcgcgaagccttccgatacatttgcggtcaaaacgccgctggaactgccgcttggcgtcaagctgcttgaagaaaaagatatatctactgaagacgggaagcgcatcatcatgacgtacggaggagaaaaatcatttacgttaattcaggaaaaagcccagattgccaaggcttcctcctccgttacgctgaacggcgaaccggtaaatctcggctacaccatcggcgccttgtcggatgcatcattgtcatggacatatgaaggcgtagattaccttctctcttctaaagatctttctaaagaggaaatggtgacagtagcaaaaagcatgcagggacaatcatcgaaataacaacaaaggccaaacatgatttggcctttttttcgttagacatcgtttccctttagcctttaattttagtatgatatgtaaatgatattgaataaaagctaggaagtgtcgtaatgagcacaaaacctttttacagagatacgtgggcggaaattgacttgtccgcgataaaggaaaatgtcagcaatatgaaaaaacatatcggtgaacatgtccacctgatggcagttgtgaaagcaaacgcctacgggcatggtgatgcagaaacagcaaaggctgctcttgacgcaggtgcttcatgcttggccgtggctattttggatgaagcgatttcactgcgcaaaaagggcttgaaggcgcctatattggtgcttggcgcggttcccccagagtatgtggcaatcgctgctgagtatgacgtgaccttaacaggttattctgttgaatggcttcaggaggcagcccgccacacgaaaaaaggttctcttcattttcatctgaaggtcgatacggggatgaacaggcttggtgtaaaaacagaggaagaagttcagaacgtgatggccattcttgaccgtaaccctcgtttaaagtgcaaaggggtatttacccattttgcgacagcggatgaaaaagaaagaggctatttcttaatgcagtttgagcgttttaaagagctgattgctccgctgccgttaaagaatctgatggtccactgcgcgaacagcgccgccggactccggctgaaaaaaggcttttttaatgcagtcagattcggcatcggcatgtatggccttcgcccgtctgctgatatttcggacgagataccgtttcagctgcgtccggcatttaccctgcattcgacgctgtcgcatgtcaaactgatcagaaaaggcgagagcgtcagctacggagccgagtacacagcagaaaaagacacatggatcgggacggtgcctgtaggctatgcggacggctggctccgaaaattgaaagggactgacatccttgtgaagggaaaacgcttgaaaattgccggcagaatttgcatggaccaatttatggtggagctggatcaggaatatccgccgggcacaaaagtcacattaataggccggcagggggatgaatatatttccatggatgagattgcaggaaggctcgaaaccattaactatgaggtggcctgtacaataagttcccgtgttccccgtatgtttttggaaaatgggagtataatggaagtaagaaatcctttattgcaggtaaatacaagcaattaacttacctaaatggagaattcataaaacagctttgcttgaagagtgaataatggtatcattatcactggatggataaaagagtcgtatccgtaagtttggtggaggtgtatgttttttgtctgaatccagcgcaagaaccgaaatgaaaatcagcttgcccgaaaacctagtagctgaattggatggtgtagcgatgcgggagaaacgaagcagaaacgaactgatatcacaagcagtgagagcgtatgtcagcgaacgaacaactcgtcacaaccgtgatttgatgagacgcggctatatggaaatggcgaaaatcaacctgaatatttcttctgaggctcactttgcggagtgcgaggctgaaacgacagttgagcgcttagtcagcggaggataatcatttgattgtgaaacgcggcgatgtttattttgctgatttatctcctgttgttggctcagagcaaggcggggtgcgcccggttttagtgatccaaaatgacatcggaaatcgcttcagcccaactgctattgttgcagccataacagcacaaatacagaaagcgaaattaccaacccacgtcgaaatcgatgcaaaacgctacggttttgaaagagattccgttattttgctggagcaaattcggacgattgacaagcaaaggttaacggataagattactcatctggatgatgaaatgatggataaggttgatgaagccttacaaatcagtttggcactcattgatttttagacatatttgcaggttgctcaaatagagcaactttttttgttttcaaaaaacataaacgatataatagtgaaataacgaaaaaatatgttgttttttattgggaggtaagcgaatttgatgtcgaaccagactgtataccagttcattgccgaaaatcaaaatgaactgctccaactgtggactgacacactaaaagaattaagcgagcaagaatcctatcagctgactgaccaagtgtatgaaaatatatctaaagaatatatcgacattctgttgctgtctgttaaggacgaaaatgctgctgaaagccaaatcagcgaactggcgcttcgagcggtccaaatcggactgtctatgaagtttttggctactgcgtttgctgaattctggaagcgtctctacacgaaaatgaatgataagagattgccagatcaagagagcacggaattaatctggcagattgaccgctttttcagcccgattaacacagaaatttttaatcaatactcaatctcatgggaaaaaacagtatctctgcaaaaaatcgcgctgcaagagctgtctgcgccgcttatcccggtgtttgaaaatatcactgtgatgcctcttgtcggaacaattgataccgaacgcgcgaaacgaattatggaaaaccttcttaatggcgtcgtcaaacaccgttcccaagtcgtgctgattgacattacaggtgtccctgtcgtcgatacgatggttgcccatcatattattcaggcatcagaagctgtaaggcttgtcggagcaaaatgcctgctggccggaatccgcccggaaattgctcaaaccatcgtcaatttggggattgatttatcccaagttataactaagaataccctgcaaaaaggaattcaaacagcattggaaatgacggatcgaaaaatcgtttcattgggggaataacattttgagacatccgaaaatcccgatcttgaaactgtataattgcttattagtgtccattcagtgggaacttgatgaccaaacagcattaacctttcaagaagacttattaaataaaatatacgaaacaggtgctaacggagtcgtcattgacctgacatctgtggatatgattgattcatttatcgcgaaagtgctgggcgacgtcattacaatgtctaagttaatgggggctaaagtcgtcttgaccggcattcagcctgctgtggcagtgacgctgattgaacttggaatcgcacttgaggaaatcgaaactgcgctcgacttagagcaggggcttgagacattgaagcgggaattgggggaatagcgaatgaacgaccaatcctgtgtaagaatcatgacagaatgggatattgtggccgccagacagctgggacgaaacgttgcgaaagaactgggtttcggcacggtagaccaggctagaattacaacggctatttcagaattagccaggaatatttatttatatgccggcaaagggcagattggaattgaacaggtcgcagacagaggaaaaaaaggcctgaaaattatagcggaagaccaagggccgggaattcctgatatccgaaaagtcatggaagacgggttttcaacgtctggaggacttggtgcgggacttcccggggtcaaaaggctgatggatgaattcagcttaaattccgtagcgggggaaggaacagagatacaagccatcaaatggcttcggtaggaggtaagaacgtggattttagggaggttattgagcagcggtatcatcagctgcttagtcgatatatagccgaattaacagaaacatctttatatcaagcccaaaaattcagccgaaaaacaatcgagcaccaaattcctccggaagaaatcatcagcgttcacagaaaagtgctgaaggagctgtatccaagtctcccggaagatgtgtttcattcgctggattttttaatagaagtcatgattggctatggaatggcttatcaggagcatcaaacccttagagggatacagcaggaaatcaaatcagaaattgaaatcgcggcaaatgtccagcagacgcttctcggaactaaagttcctcaggaggaagcgctggatatcggcgccatcagtgttcccgctaaacagatgagcggtgattactaccactttgtcaaagacaaggaatccatcaatatcgcaatcgcggacgtgatcggaaaaggcattccagcggctttatgcatgtccatgattaaatacgcaatggactctttgccggaaacgggcatacacccttctcaagtgctgaaaaatttgaatcgtgttgttgaacaaaacgttgatgccagtatgtttattacgatgttttatgcgaattacaatatggacaagcatcaatttacatatgcttcagcgggacatgaaccgggattctattattctcaaaaagacaacacgttttacgatttagaggccaaaggactcgttctcggcatctcgcaggactatgactacaaacaattcgatcagcatctggaaaagggcgatatgattgttttattttctgacggcgtcacagaatgcagaacggaaaacggtttcttggagcgtcctgatctgcagaagctcattgaggaacatatgtgttcctccgcgcaggaaatggtcaaaaacatttatgacagcctcctcaaattgcaggattttcagcttcacgatgattttacgttaattgttttgcggagaaaggtttaacgtctgtcagacgagggtataaagcaactagtgatttgaaggaaaatttgaggtgatacgaatgaatataaatgttgatgtgaagcaaaacgagaatgatatacaagtaaacattgcaggagaaattgatgtatactcagccccggtgcttagagagaagctcgttcctctggcagaacaaggagctgacttaagaatttgcctgaaagatgtcagctacatggacagtaccggattgggcgtttttgtagggacctttaaaatggtgaaaaaacaaggcggttcgctgaaacttgaaaatctttctgaacggctgatccgactgtttgacattacaggcttgaaggacatcattgatatttctgcaaagtcagaaggtggagtgcaatgaagaataatgctgattacatcgaaatgaaagtgccggcccaacctgaatatgtgggaattataagactgacgctgtcaggggtcgcaagcagaatgggctatacgtacgatgaaattgaagacttgaaaatcgcagtcagtgaggcgtgcacaaatgcggttcagcacgcttacaaagaagataaaaatggggaagtgtcaatacgattcggtgtgtttgaagaccgtttagaggttattgtggcggatgaaggagacagctttgactttgatcaaaagcagcaggatctagggccgtacacaccttcgcacacagttgatcaattatcagaaggagggctcggtctatatttaatggaaacgctcatggatgaagtcagagtgcaaaaccactccggcgtcaccgtagcgatgacaaagtatttaaatggggagcgagttgatcatgacacaaccatcaaaaactacgaaactaactaaagatgaagtcgatcggctcataagcgattaccaaacaaagcaagatgaacaagcgcaggaaacgcttgtgcgggtgtatacaaatctggttgacatgcttgcgaaaaaatactcaaaaggcaaaagcttccacgaggatctccgccaggtcggcatgatcgggctgctaggcgcgattaagcgatacgatcctgttgtcggcaaatcgtttgaagcttttgcaatcccgacaatcatcggtgaaattaaacgtttcctcagagataaaacatggagcgttcatgtgccgagacgaattaaagaactcggtccaagaatcaaaatggcggttgatcagctgaccactgaaacacaaagatcgccgaaagtcgaagagattgccgaattcctcgatgtttctgaagaagaggttcttgaaacgatggaaatgggcaaaagctatcaagccttatccgttgaccacagcattgaagcggattcggacggaagcactgtcacgattcttgatatcgtcggatcacaggaggacggatatgagcgggtcaaccagcaattgatgctgcaaagcgtgcttcatgtcctttcagaccgtgagaaacaaatcatagaccttacgtatattcaaaacaaaagccaaaaagaaactggggacattctcggtatatctcaaatgcacgtctcgcgcttgcaacgcaaagctgtgaagaagctcagagaggccttgattgaagatccctcgatggagttaatgtaatgatccaggttgaagaaaacgagcatattcaaactctagtatatcaactgaataaagaagggaaatcgatttgcggtgacagtttttttatgaaagctgatgataaggagttaatttgcgcggttgctgacggactgggaagtggatcacttgctaacgaatcctctgcagccatcaaagacttagtggaaaactatgcgagtgaagacgtagaaagcattatcgaacgctgtaatcaggcgatgaaaaacaaaagaggcgctacagcatctatcctgaaaatcaattttgagcaaaggcagtttacgtactgctctgtcggaaatgtacggtttattctgcattccccgtctggtgaaagcttttatcctctgccgatttcgggctatttatcaggcaagccgcaaaaatacaaaacgcacaccgccacctatgaaaagggttcaaagttcattatacatacagatggactcaacgtacctgatatccgctcccatttaaaaaaaggccaatcggtagaagaaatatcgaattcgctgaaaatgtatacgacatcgagaaaagatgacctgacctatattctcggacagctgtcctagagaataagaacaagaagaagccggaatgccggcttctttttttatgtgtttttttcggtttttgatacactagagacagaacgacaaaattggaggctttggttacatggaaacgtcagcccttttaaaacagcaaattgcgaaagaaataggtttatcacaaaaacacgttgaaagtgtcatccgcctgcttgaggacggcaatacagtcccgtttattgcccggtatcgaaaagagcagacgggttcaatggatgaggttcagattcagacgatttctgaacgctggcaatacatacaaaacctgaatcagcgaaaagaagaagtcatcaggctgatcgcagagcaggataaactgacagatgatctaaaacgtaaaatcgagcaatcggtgaagcttcaggaagtggaagacctttaccgcccttataaacaaaaacgtaaaacaaaggcgacagtcgccaaaagcaaaggccttgagccgcttgccgactatatcctgacacttccccaagatgatcgtctggcagcaactgcagaccaatacatcagcgaagaaaaagaagtgtttacgcgagaagaagcgattgaaggcgccaagcacattattgcggaacaaatttcagacgagccgaccttcagaaagtggattcgccaggaaaccttcaaaagaggaaccattaagtctgcagcaggaaagtcggcagacaccgatgagaaaaatgtgtatgaaatgtattacgagtatgaagagccaattgcaaaagtcgttccgcatagggtgctggcaatgaaccgcggcgaaaaagaagacattttaaaggtagcgattgaaccgcctgcggatcacattaaggcgtatttagaaaaacaagtcatcaaaaatcgctcaacatccgtaagagagattttgcaggagacaattgatgacagctataaaaggctgatccagccggcaatcgagcgtgaaatcaggaaagagctctcagaaaaagctgatgaacaggcgattcatattttctcagagaacttgagaaaacttcttttgcagccgccgatgaaaggcaaaaccgttctcggtgttgacccagcctttcgaaccggctgtaagctcgctgtgtcagatgagactggaaaagtcttgaaaattgatgtgatctatccgcatgcgccagtcaacaaaacaaaagaagcccatgaaaaagtgaaaaagattcttgagcagtatcaagtcgagatggtggcgatcggaaacggcacagcatccagagaaacagaacaattcatcgtcaatgtactgaaagacatgccgcgcaaaatttattatgtgatcgtcaatgaagcgggtgcaagcgtctattcggcttcagagctggcccgagaagaattccctgaccttaaggttgaagagcgcagtgccgtgtctattgcgcgaagacttcaagacccgctcgcggagctcgttaaaatcgatccgaagtctgttggtgtcggacagtatcagcatgacgtcagccaaaaacgcttaaatgaatctctgcggtttgtcgtcgaaacggtcgtaaaccaggtgggagtaaacgtcaacacagcctccgtcgcgctgcttcagtatgtagcgggattatcgaagtctgtagcaggcaacgttgtcaaaaaacgtgaggaaatcggaaagttttcaaatcgaaaagaactgaaggacatcccaaggttaggtgcgaaaacctacgagcaatgtatcggtttcttaagagtgcaggaagggacagagcctttggatagaacaggcatccacccggaaagctataaagaaacaaaagcacttttgaaaaaactcggactttcaacagaacatatcggcacggcggaattgaaggacaaaatcaatcagctggcgctctctgaaacggcaaaagagctgggaatcggcgaaatcactctgaaagacatttgtgaacagctgacaaggccggaacgcgatccgcgcgatgaggtgcctaagcctttgctgaaaacagacgtccttcagctggaagatttgaaagagggaatggaactgcagggcaccgtgcgcaatgtagtggacttcggagcgtttgttgatatcggagtcaaacaagacgggcttgtgcatatctcaaaattgagcaatcaattcgtcaagcatcctcttgatgtcgtatctgtcggcgatattgtgacagtttgggttgacggcgtagatgtacaaaaaggcagagtatcgctgtctatggtaaaataaaagcactgcttacgagcagtgttttttcctatagaaataccagcattgattcagcagtttaatttggtaattatctttttcaaggaacgctttttgcatctgctttttaagccaatttggcataggctcattcctcctcagcttttatcataagagggacggtgattaccatattgtatgcgaacggtgaattgtcccgttcaatgttttttaagtgaggtgcgctatggataatatagagcttcaaaagctgacagaggatatttctaaaacatattttaaaaagccgttccgccatcaggcgctttttaatgacaggcttaaaaccacgggcggaaggtacctgttaacctctcataacattgaattgaacagaaaatatctgattgaacacggcagggaggagctgatcggcatcatcaagcacgagctctgccattatcatctccaccttgaaggaaaagggtacaagcacagagacagagattttagaatgctattgcagcaggtcaacgcgccgaggttctgtacaccccttaagaaaaaagcggaaaacaaaaaaacttatatgtatatctgtacggcctgcggccaacagtatataaagaagcgcgccatgaaccctgacagatacagatgcggaaaatgccgcggaaaaataaaaagaattttttcgtgaaaaaggttgacgaatatggcaagcctatgttacattataaaagtcgtcacgagagataaataaaaacatttacctcttgacactgcaaatcaaggctgatataataagtcttgtctcattattccacagtagctcagtggtagagctatcggctgttaaccgatcggtcgcaggttcgaatcctgcctgtggagccatattggagaagtactcaagtggctgaagaggcgcccctgctaagggtgtaggtcgcgtaagcggcgcgagggttcaaatccctccttctccgccataagatttcgatataagttctcaaccatcggcccgttggtcaagcggttaagacaccgccctttcacggcggtaacacgggttcgaatcccgtacgggtcattccatttcgttgggctatagccaagcggtaaggcaacggactttgactccgtcatgcgttggttcgaatccagctagcccagccattttttattttttgaaatctaatagtaagagccattagctcagttggtagagcatctgacttttaatcagagggtcgaaggttcgagtccttcatggctcaccatttgtatttttgcgggtgtggcggaattggcagacgcgctagacttaggatctagtgtcttacgacgtgggggttcgagtcccttcacccgcactttatttacaaagtgcacgcaaatcggttttactaggttaagagcctactaaaccagcacaaacacaatttaatgatcacgcggtcgtggcggaatggcagacgcgctaggttgagggcctagtgggtgaataacccgtggaggttcaagtcctctcggccgcatcaatgataccaagggtttagagtaccttggtattttttgtatcttttgaacagaaggtattttgtgattaaaactgaccacttacctaaagtaagtggtttgatttgtccgcaaaagtatatagttaaataagataaaaaggacatagtatatcagcatacaaaatatgttatgcctttttttgttttaataacgcatccgttattttcagcgtacaatgttactttattatggaataaaaacaagtgtctgtaagcttgcttccatctgcggataaatcatcatttcttaaagtgccttcgaatacaaacccaagtttttctggaatagcacgacttttaaggtttgttgattcacatcttatttcaattcttctaaatttaatattgtttaacccaaaatcagctaatttttttactgcttctgtcatatatccattcccgccaaatttagtatttacccagtacccaatttcacatttaggaatggtccagtcaatcctctgaaggctagttattccaataaagttattgctagctttatcaaaaataagaaaacgaaaactttccctctttaaaaaatttatatgagcatttcttaaatttatctctgtttcttcaacagtaggaagttcttgagcaaatggcaaccaggcttttaattcattaaaggaacccctaattgcttggtttacaattttcccgtctcctgtttggtgtggtgctcgaaggattagtctttctgtttccaattgtaaaggcacatctaacaataaaggattcatttgatttctcctctcggaattttatattaaagaagcaaagtaatacaaaataaagctttatgacgtgcgcaaatttagttcaatttgcgtttaatcttctaaaagatattttcgtaactgacatcatatacctattgtgagaaagtcgatgataagtatcatgagatggaaggtatgccaataaacggtgaaaatgatcgtcttggcttatcaaagaaaacaccagactatgaagaagcaaaagatgaagagacaaagttaggagtaaaacgtgtgtttactcctcttttttaattcttgggttcattttcctcattctgggtgttcgattgggtgctcttttttcggtgaatttttttcctgtcaacatctccatttgacgtctagctctggccatttcagtaggaagaatgtaaatatattcaagtatcttatttgtaaatttaaataaaggctcaaccatagtactgttaaattctatatcatcaccatgagcagctgcattccctgcctctttaatcatcttagaaagaccgcccattaaaggtggtaaaattttcttttcctctaagtcgttaagttttgcatgaagcgttcttccaatagcccctttatttttacataccatttccaaagttcttctaagagccattaggcacaccatagcatcaattttccttacatttaaagctgactcataagcagatttaatgtttttaggtaagaggtttaaattcacctgttcactatatgggaacaaaacttgaccatctttataaatatcatcaccctcgttgtatacttcttcagtattccaatgagtatgatacagttgaaattcaaaacaaacaggacactcgaacacttcaaatatgtcattaaattgggcttcataagaggttaatggtacaaatgtttttttttcatatctgtttaacaaattcataggtgccttagttccacaatgtgggcaagtgagaattgtattttctgtcattttatctccctcaatagatttttcctcgtattataacactcttgtttaaattgttaaaatttatcactaatgatttaatagttagcaaatttatatgaaatctaaggaaatagaagatctcaataatgcttatgagactataaaagaaattgagaagcaagggcaattaactggcatgttggaatactatttttacttttttaagggtatgtacgagtttaggcgtaaagaattaatttcgtgataagtgcttattgaatagctgaatcaaagttgtcagaagttgaggatgaaatagagaaagcagagttttttttcaaagtgtcctatgtatattattatatgaaacaaacatacttctccatgaattatgcaaatcgtgcactcaaaatatttagagagtatgaagagtatgctgtccagactgtacgttgtcaatttattgtagcaggaaacctaatcgattctttggaatatgaaagagccttggaacaatttttaaactctttggaaattttcaaggaaagtaacattgagcatttaattgcaatgtcacacatgaatattgggatttgttatgatgaattgaaagaatataaaaaggcttcacaacatttaaacttggctttgcaaatttttgaaaaatcaaaacatagttttctaacaaagactttattcactttaacctatgtggaagcaaaacaacaaaattatgacgttgctttgacatactttaggaaaggacgatttattgtcgataaaagtgatgacaaagaatactcagcgaaattcaaaatattagaggggttatttttttcagatggcgagactcaattaataaagaatgcattttcatatctggcttcgagaaaaatgtttgctgatgttgaaaatttttcgattgaagtcgctgattattttcatgaacaaggaaatttaatgctctctaatgaatattatcgtataagtattgaagcaagacgaaaaattaaaaaaggggagatcattaatgaaaatcaaccggattctattggcagcagtgatattaggtagtgttttatcatttggacattttattgatcaggatgttaaggcatcaatacaagtagcttctgatagagttggggcataattagataagaaagagtgaggttgaataatatactcactcttttattgattaaagtaatactcctaataatattatttcccttgatgtgctaaaattaagttatattggtacttttcatcatcattataagcttaaaaaatatggtattaatctaacagtgaaagaggaatgtaaaaatgaaagaggctaatgatcattatcctagttacggggcaaataaatttgtgtgtccaacatgtatggtgtattcacaacaaaagtggtatgagattcaaaaaaatgatatggataacgaattaattctcacagagcatttaagaacaagagggcgtgtgcctgcttatgcaagtccaaataaagaagctagtgttatacatgctatacctcaatttcacaccgataacataactgctctaagtgtgtgtatcagttgtgatcaaccggcttactggattgatggagaattagtttaccctaaaaatccaactgtgaaacctccaaattccgacatgccggaagaagtgaaaaaactttataatgaagcgagagaaataagtgtactatcacctagagcttcggcagcattacttagattagcattagaaaaattattacctttattaggtgcacaagggaagagaataaacgatatgataggtgacctagtacagaagggactttcgccgaaaatacaacaggctttagatagcttacgtgtaattggaaatgaagccgttcacccaggttcaattgatttagatgaagaaaaagaggttgcattagcgctatttaagttaataaatttagttgtagaacaaatgataaccgaaagcgatgaaatagatgagatttatagtctaattcctaaggataaacgagatgggatacaaaatagggatcaaatgaaaacaacaaaataagctaaaaaaatgaacataccacaacgatgttggtatgtttgtttattgaaagaacattcatgaataagttgaggtcataggaaaagtgtttttcttcttaaagaagtgcccattttctgcccagaattaataataaattatcaaaatcagtgtaaataatataactcgatgctatgaataatggcttttgtaaatgaagatatgattttgctaggttgagggactcgaattaaaaaagaagataccaaactatattggtatcttctttttttttgcatcagagttattaaatctttttatattgctgatgttaaattaatgtcccatttttacactaacgatgtgacttatatgataattatatacaaaaatcacttatatctagaaaattaaacaaatttacacaaaaaaggacaaaataatctttacaaattacgacaaatacttgatgttttttgtaatcaacccttattttgtgacaaatatatgaatattttgtcaccctgtaaaatatttatttattatatatatttaattcgagaggaggtcatataaagaacgaatattcgaattagtatgaatttaccgggagatagattcataaaacaattaaataatgggagtgggagtctatgagaaagggctttgtgcctaaagcttacatactgaatcttaggaaaaccctaatgatttttgcagtcttgttattgattgctggcaatgtgttgacagttttgccgaatcatattcatgctgaagataatacagaggtaactcaaagtgcagatactacttgcccagctcctgttgcgttgattaacggaagctttgaacaaggtgctgcaagaggatctgcatatgataaatccggactctattatctcgaatccgaggtacctggctggaaaacgactgatgattcctctggtcagaaggcaattgaaatatggaactatgcacagaatattccggctgttgtgaaaaattggccagcacctccggatggcaatcgctgggctgaattaaacgcttttgaaaatggcatgttgtatcaagacgtgaaaacaacgcctggacaaacgatttattggcgcttatctcatatgggacggcaaggtgttgacaccatgcaggttcgtattggggcagctactagcaatccatacagtacggtggttcaaaaacaattctctgatggaagaactgcatggggaactcatacaggttcttatactgttcaagcaggccaaacgacaacgcgattcggttttgaagctgtaagtacagcgtctggaaatataggagccggcaactttttggatgatattttccttggaacagaaccatgtgtgacggcaaataagtcagtttcaccacagggagaggtacaacccggggatgagcttacatacgcggttcaaatcaaaaatgaaggcggagacgttgctgctgatgcaagcttttcagatgcaattccagagggaactgaatatgttcctggatcattaaaattaattaacggttcgacaacaaagaatttaactgatgcagcagatggtgatgaaggcaattttgatggtaataaagtaaatgttgcattaggagatctacctaacacgaccaacttgcctaatggaatgactgtacagtttaaagtgaaagctaagacaggttatgtcggcaaagaaatttctaacaaagcgcaaataaactatgacagtctattaacgaatgcaagtaaaaaaactgaatcaaacgaagtaacgactccggttgtttttaaagatcctgtacttgaatcaaagaaaacatctgctattaaggcaaaagcggatggaaaccaagacgtggatcacccagaagttggagatacgctttcttacacgattcaaacacgaaatacaattgaagacagtcaggtgaaaaacgttaccatttcagatgcggtgccagaaggcttagaatatgttccgggctctttacaagtagatggcacatcagtcagtgatgctcatgatgatgataaggggcagtatgctgatgggaaagtatcaggacaggttggtaatataagcgataccaaatggcataatgtgacttttgaagcgaaagtgaagtccggtcaagcaggaaaggatattatcaataaggcaagcatttcaggagataatattgaaactccggatacaccgagtaatgaagtcaaagtttatccgaggaatcctgccttagagtctaagaaaacatcagcaattaaggaaaaagtggcaggaaacaagtatccggatcacccggaagtaggagacacgcttctttacacaatccaaacacgaaatactgaagaagacagtgaggctaaaaatcttacgatctcagatgctctaccaaaaggactggaatatgttccaggcactctgaaagtagacggtacagcagtcagtgacgccaaagacgatgacaaaggtgatgtgacagacggtaaagtgtcaggccaaattggtgatgtgactgatactgaatggcataatgtgacctttgaagcgaaagtaaaggccggacaagctggtgaaacaattcaaaatacggctagcgttactggaagcaacgtcgacacaccagataagccgagcaatgataccgagatttatccaagaaagccaaatgtagaatcgaagaaaactgcaagcctacaggaaaaagcagagggcaataaagatgagaaacatccagaagtaggagatacacttctttatacaatcgaaacgagaaacacaattgaagacagtctgctgaaagatctcgtcatttcagatgaacttccggacggattagaatacgtttcgggctcactcaaagtagacaataaaggagtcagtgacgccaaagacgacgataaaggtgatgtgacagatggcaaagtgtcaggtcaaattggtgatgtgactgacacagaatggcatactgttacctttgaagcgaaagtgaaagctggccaagctggtgaaacaattcaaaatacggctagcgttactggaagcaacgtcgacaccccggatactccaaaaaatgaagttgaagtttatccgaggaatcctgccttagagtcaaagaaaactgcaagtattcaagcaaaagcagagggcaataaagaagagaatcagacacaagtgggagatacacttctttatacgatccagacaagaaacacaattgaggatagtctggtgaaaaatcttgtcatctcagatgaacttccagaaggcctagagtatgtttctggaacgctaaaagtagacaataaagccgtcagcgacgcccaagatgatgataaaggcgctatgacagacggcaaagtatcgggtcaaattggtgatgtgactgatacagaatggcatactgtaacctttgaagtgaaagtgaaagctggccaaagagatcagaaaattgtgaataccgccagcgtcacaggtgacaatgttgataaaccagatacaccaagccatgaggtcaaagtttacccgaaaaatccagtcttagagtcagagaagacagcaaagaatctggattccgataaagagaagtatgaagcaggagatacgattgtttacacgatcaaaacaagaaatacagtagcagacagtaaagtaactgatctcgtcatctcagataaactgccggaaggcttagaatatgttccaggcacactcaaagtagacaataaagaagtcagtgatgcccgagatgatgataaaggcgatgtgacagacggcaaagtatcaggccagtttggcgatgtgactgatacagaatggcatactgttacatttgaagcgaaagtaaaagctggtcaagcagacaaaaaaattgtcaatacggcgagcattagcggtgataatactgataaaccggatacaccaagccaagaggtcaaggtttctccgaaagatccagttctgaagtcggaaaagtcagtaaaaaatctcgattcagataaagggaaatatgaagcgggagatacagttgtttacacgattaaaacaagaaatacagtagctgatagtaaagtaactgatcttgtcatctcagataaacttccagccggattgaagtatgtcgaaggcagcttgaaagcgagcaacggtggagaagcaaccatcaaggacggcaaaatcacagctaactttggtgacgtgactgataccgagtggcgtagtgtgacattccaagcgaaaattgagtccggatatgcggaaaaaacaattaaaaacgtggcaaccgttgacggcggcaatatcgacacaccagatacaccgggaacagacatgaaagttgatcctaaggaaccaaaactagaatcaaagaaaacagcctccattaaggaaaaagctgatggaaataaagatgaggaccatccggaatctggcgacacgcttctttacacaatccaaacccggaacacggttgatgacagccttgtcaaagatcttgtcatctcggattctcttccggaaggattagaatatgttacaggaacattgaaagtggatggtacagcagtaagtgatgatcaagacgatgatcatggatattatgccgatggtaagacgtcaggagagtttggcaatgtgaccgatacgaaatggcactctgtaacatttgaagcaaaactgaagtctggtcaagcaggtaaagatatcgtcaacactgcaaacatcagcagtgacaatatcaagacccctgacaaaccgagccatgaagtgaaggtatatccgcgaaatcctgttttagaatctgaaaaaacagtgaagaacttggattcagataaggaaaagtatgaagcaggggatacggtagtctacaccattaaaacccgaaatacagtatccgacggtaaagtagaaaacctggtgatttcagatgatcttccagccggattgaagtatgtcgaaggcagcttgaaagcgagcaacggcggagaagcaacaatcaaggatggcaagattactgctaactttggtgatgtcactgatactgagtggcatactgtgacattccaagcgaaaattgagtctggatatgaaggcaaaaccattacaaacgtggcaactgtaaatggcagcagtattgataagcctgataaaccgaaagcagagatgaatgttgtatcgaaaggttccgagaaaccaaatgaacctgctaagccaagcaaaccaacgtcagagccaagcaaaccaacacccgaaaaaacagatggaaagacaaatacaggaaaagaacttccaaatacagcaacaaatacgtataatctgatccttgttggtttggtattgttagtagcaggaactgcactttggtactttagaagaaaaagaaatgcctgatgttgcatgaagaaatatcttcctatattcatcattattgccggactcgtttttacaggttacggagtctggaaagtgatggacatcagtcataaaacagaacaaactttagatgaggcaaaacttgcattaaagagtccttctggaaaaaatgaaggctcagataaagaaggatttaagcctaagttcggagaggcagttggcattctggagattcctaaaattaacgcagagcttccgatagtagagggaaccgatgcggatgatctggaaaaaggagtcggccattacaaaggaagctattatccagatgaaaacggacaaattgttctatcaggccatcgggataccgtcttccgccgaacaggagaactaaaaaaaggtgatcaattaaaggtgaagctgccatatggaagtttttcatatgagatagacaaaacaaagattgtagaccaaaaagatacgtctattattacgctgcagcataacaaagaggagctaattctaacaacttgttacccattttcatatatcggtaatgcaccaaagcggtatattatttatggaaaacggatttgagaaatccagaatatcaaagattaggctgacgaattttcgtcagcttttttaatcatgttctttctgcattctggttcatgttaaatcatagtaatctaggttaatataaaagtattttgtatatttttataagtttactttacttttttataaggtgagtttataatttggttcaagaggtgatggtcatgaagaaagattttggtgattcgatctcaaataaggtttatgaatatcgtgtacttgccagattgtctcagcaagaattagcaaagaaagtcggggtttccaaacaaaccatctttgtaatggagaaaggaaattatgttccgactctgctgttagcttttcgaattgccgaattttttaatgtggatgtaaacgagatttttacttatgagaaaggaaatgatcaaaaatgaaaatgaattcgatcacagatacgatcaccaacgcaattttttcccctttaaagtcctgggctgaacattctccgggaaattggaatattcttattggcagtgggtttgtattgcttgtagtcggattgattctgacattcgtatttactaaaaaaatgggtaagactgacgaaagaacaaaccaaatcgctttaaatggtagcctctgtacgttatgtgcactaattttttgcgacttgcttttcccaaaagaatatatgtggcaagttttcttcttatttaagtattctattgcattcttcgcttcagcaatctatctagccgttcgatataaaaaagattttttgtaaattcaattaccgagaaagatagtgtctctgtagttgtaattgttttaggagagggaacgaatatgaaatcatttaataatgaaatttggagatgtgggaaagtatgggggttttttgctcgccaattattaaccacaattcatacaaaccgttagagatgatgtaaaatgtaatgaaaataagctttcataaccagtgctatggattgactatgttgagggcctagtggggtgaataacccgtaaaggttcaagttctctcggccgcacccccaataataccaagggtttaaccatctttggcgttattcttttgcggaaaatacggcaacaaatgtaccgcattgtggagtccactaaaaaagtgctgacctctgcacaacatcgttgcgcgagtctgcacttttattctgcgattatggggagtttattttaatccgttgttagccgcgccgatacttggcttttagaagctttttttaagtggctaaaaccaacaaattttttgccttcttcatcccataggcggaactttaacgatttaaggcttgttgccagtgtaatggtcggaacgttttgcaatggtttagtgttgttatgcactttttcaagcttatagtttgggactctcgggcttaaatgatgaacatgatgaaaaccgatattgcctgttagccactgcatgacttttggaagcttataaaaagagcttccttcaactgctgcttttacatattcccaatgctcatcttcttcaaaataagaatcctcaaacgtatgctgaatataaaacatccaaattccgagagagcctgatatcataaaaatcggcacctgaaccagcaggaagttttgccagccaatagcccaacataaaagtgctgccaaagcgacgatccccaggttcgttacatacgtattcatccgttctttgcgttttgccccttttcgattaaaacgattggcaatcccgaaaacgtaaatcggcccaataataaacataacaaacggatttctgtacaatcggtacattatttttgtcttagttgaggctttcttatattcctcaaccgtcagtacccaaatatcgcctgtaccgcgtttgtccagattgctgcttgtcgcatgatggacagaatggtcgtgtgcccaatgatcaaaaggatgcagagtcagaattcctgttaatgttccaaggattcgattcgcctttctgttcttaaaaaaggaatagtggcagcaatcatgaaagatgatgaaggttctcactaaaaaacctgccgcaacaacagaaatcgctaatgtaaggaaataagaaatcgacaagctcttatatgccaaacaccataataggaaaaatggtaccaatgtgttaatgatttgacaaatgcttttgtgtaaatcggacttttcataaggtgtaaccagttttctcaaagtccttaggttttgttctttcatattaaaaagtttccccttccctggtgatcttctaagtgtagaaaacgttttatagccttagaaggcccaacgtgatacaccccatatatgataagtatccttcccgattcatctgtgaaattattggaaatgataaactgatttccagtttattattagcagagtcagccgggatacaaaaggcgtatgaagattatacccagcactttattgggtcaaactctctcaatgctcccccatggggatcgatttatttgaccgtgaacattgattgtttgaggaaaaaaggaatgaagtaatgggtatatccatgagtgactgtttggaaacatctgcagaaacaaagttttacaagtgaacagccttgtttttaaaagattatcttgctctttaacaagaaacagctgagctaagtactattaagcaaagaaaaaggtttgaagacactcgtgattcatttttcatggtgttttcaaaccaaagtttttaataggcctcttattctgcactggtatacacatgtttaacaaataatgccatgaataaatcggaaatataatttgcagttatttccgattcctgatataataaagaagaattatttttgttcggtgtaaaggatagtatgaagattgacttttcgtcttgatgatactttgggcaaggatagtatatactgtgtggttacacactaggaggcaacaaaaatggaacaaggtacagttaaatggtttaatgcagaaaaaggttttggttttatcgaacgcgaaaatggagacgatgtattcgtacacttttctgcaatccaaagtgacggattcaaatctttagacgaaggtcaaaaagtatcgttcgacgttgagcaaggtgctcgtggagctcaagctgctaacgttcaaaaagcttaatcttcaatcgtttatacaaacaggctctttatatagggcctgtttttttatgtctatatcatactcaataaaaaaccctactcaacgttcgagtagggagatgctacaaggtatagaaaaagatttaaaacttcaaaggtttgtttacagtataacatactggattgacaatatgcggaatgtatataaattatttaatgttttgttcaaatataactctttcttttttcacgttcgttactttaagtaagattagatgaattataaaaatggtttcatctaaatgttatcaactcgcatatctcttttatgagaagaagataaacaattattattcaatgtggcagtggatataagaaattcttaaaaataatgaggagatcgattgtttttttctcctggaaataatcacttagagatacctaaaacaatgaaagccctacctctcttccatccttacggctccttgtccgtgccagtgtgaatcaggatactaaaaaaagtgactattttattgagttttttggtaaaacttcaatcttcgcagaagaaatgtaaataataaaaatggattagaatgtaggaataacaaaagaggtcgttaatgttctaaacataagttggagaagatttgcttttcatcataatattccgaaatatcttttgggatgtatctaaccaaaactttttatttgtttttcagtgattcctttaattacttccagttcactaatcaaaaattcatatgcattatccagcatttttttttcgcttgcattaagtgctttttctttcttcatacgcattaaatcacgtacaacttcagcaccttcttgtatttcacctgtttttattttgtccgtgtttattttgtacctttgcttccatggcagtaacctatcggattctccatgctgaaaaatgtgcataatgtgttttaatgcaagtatatcggtaactggtcgtatattcgaactcaatattttactcgttggaatcataactgtcatattactgattgacattcttatgacataatactgttgtttttcctctaagaattctttttcttctatggcttcaattatacctgctccgtgcattggataaacaatgttatcgccaatttgaaacatatcatccacctccatatatggtatccttcttaagattaccatatatggaggtgtaatatcaaaattttaataataacatgatcgaatttttgatgtcaataacttttttgaaaaaacagatcaagcaaaaacaatagggaacgtgtcggatttccaatcaggaaaaggtcaattgatccgtgtgagcagtttttcattggctcaatgacatcacagaaatgatttgagtagaaataagaaggaacgatatttgtgaaatgtcagctaaaaatattaaaagtacatgattaagttctaatttctttaccgatttgatatggataacggcccacttacttaatgatgcattttcacttatcttgcgaacagaaaaaggtttgtggatattgaacattttgccaccgagattggcattattatcatggaaattgacaaccttcaaatgggtattgaggtgaaaagaaaaataaagaaaggagagattataaatgaagaccagaacataaagaagtgaaggggaaagaacaaggttaattgaaaagcaaactatataaaatagtttgcttttctttttgttatgaattcacttctttttctttctctttaatgactaataaaacaccgctcagaattaaaaacgaacctatccaaaatgtcccgcctatttgttctccaagcagaatccatccgagtaaggttccaaccagaggctgaaaaaagaaaaagaggcctccacttgaggcatttaataattgtaagcctcggttccacaataaaaaagcacaagcggttgaaacaattcccaaatacaaaagaccacctagaattttagggtcaagcagttgtgatgtaaaaatggtgctaggttttacaaaaggagttagcgccacaatggcaacaaaagttgaatatgttgtaacaagtattggtgaataactgcttggaacgcgtttgatcagcactgacataagtgcccatgtaagggctgcaacaagcagagaaataccgccaagctgatgagatgtatcaatatgtccgtttcccacaataaagaatacacctatggtcgctaaaataattgaggttccttttttgatagtcaatggttctttaagtaatagacgagcaaaaataaccatgaacgctggtgtggaggacgtaataattgctcccatttgtgctgaagacaacatcgttccatattcttgtgtaacaattgaaatggtgttgccaacaattccaatggccacaattaataaaagatcgcgcttatgaattttccaagattgtttccttattaaaccaacaataagaagcgcaaggatggcgatgacatacctggtccaaaccaattcaaaaggcggaatcactgcgacaacaaccttaaccacaacatacatgccaccccagatactagcggctaaagctaaatatatagaacctaacagggtatttttcatttttttgttccctccgtatttaaaattaggtcaataaatgccctaacggagagaagtagtcactttactccattaagggcggagaagtgctactggaacatcattttcaaatagtggagctaaaaacatgttatgatcacctcgatttttaagaatgactatcattatacaatgttggttataaagccgtaaacaccttaaggggactccatttattaatagaataaactttatgaattcatttttttgtatgataatggcgtcatattcatcgcttgttgaaatttacttatgaaataactggtactgttaaatccaacttgataagacacttctgtcacattggattcagggtgttgcagtaataataagcttttttgaattctataatccattacataacgtaatggcgtcttattcagcattcgtttaaaataacggcagcactcagaacggctcagttggccagcttttgcaatgtcctctaatgtgattttttcagcataatggagatggatccagtttaacatttgtttcattcgatgactttttatcatttcagattgatcgtactctaattgaaaaccattaacgaccatgtttttccacattaacgttaattgcatcgtaatgtcaatctcatagagcgatgtcttttgttgaatcaattgatttatttttttaacagcatctagaatattttttgcccactgttgatttccatccaaaaataaatagggcaaattggttgaaaacatatagggctgaacatagcttgaatacagttcctgagataaaacgaaatggggtgacacatttaaacaaatatacgtacaatccgagccttccttttcttctgccatgtgcaggcagccgctattgataaataatccatccccttcgtgaacctctattttttcttcatttatttgaaagagagctattccttttagtatcaaaacaaattggatttcatcatgccaatgaagcggaatatagccatttatattttgattgatccttgtcttgtaacaggcaactggtaattctaccgttcggtgctctgttaattcttttaaattttgatcgatcacaaaattcttcattctgacttctcacctcaatatatttatattttttcattcgatttgagtattttttatcctattttgcatttattataacactattattatatttattagtgaggagtcatgtatgaatacttccaatagaagaatgggattgttctatgttataacaggggcgacatgttggggaattggaggcacagtagccaaaaaactttttcaagaatatcaaatcgatgtcaattggcttgtaacgacacgcttgcttacggctggaatgttacttttaatgctgcaactgttcagaaaggaccggtctcaggttattgaggtttggaaaaacaaagcgtcggctggccagcttctaatttttggcctattgggaatgcttgctgtgcagtacacatatatggcatccattcaacatgggaatgctgccgttgctacattattgcaatatttatccccagtaatcgtcattatctacacgcttttgcgaaaacaaacggttcttaccaaacaagatatcattactgttgtacttgctttagtgggttgcttttttttgttaacaaatggttcaatatctcaactttcagtgccggcagctgcagtagtatggggagttttatcaggattcgcggcagctttttatactttatatgccgttggtttattaaataaatttgattctcttgtcgttgtaggttgggctatgattattggcggttttgcattgggttttatccatccgccatggcaactggattttcaacgattaactgctgaggcgtatgcatatattttatttgtgatattatttggaacaatgattgcgttctggttcttcataaaaagcttggaaagcctttctcccaaagaaacaagcctattaggcagtttagaacctctatcagctgttgtaacaactgtcgtttggttaaaagcgccatttggttcttttcaatggattggtgctatttgtattatagggataactttaatattggctttacataaagagccttctatggagagtgaaaaatcgatattaaagattaggaatcatgcaaatcgggatatataggggctttttttgcttacatgaccggtccgacaatgaaaaacactggtggagtttgagccctctcggcaatatcaaaaagaccaagggttttgacgcccttggtattttttcttcaagaaccttcaatttttcttttttgtaattggtatccaaatttcacttttaaaagatggtgatgttacatccttatgctcgttccacaatatttctggaccttctatttgttcgtaatttgacgatggaaaccattcggaataaatacgtccccatacttcttgcagtgtatccggaaatggcccgattgattcgaatacagcccacgttgaggcaggaacttcaagccgtgagaaattatctggacactgtttcgttgtggctgcgccaatatagtgatcaagctctcctttttcctctgcccgaccttcagaaaaattggtggatgcactaatgagtcctgatggtgctacattagaaagctcttttagtttatttattgctttttcatctaaactttcccacatagatgcaatttccggattaattcctttgaaaataatatgaactctttttttaatgccaacgatgcgaaatgcctctttttcttcaatacggtagttcatttcatttcctcctttaattgttagctggaaggtcattcgtggataagctttaagggaatggccattaagtctggcttttgatgggtttatgccatgtaaattttggaatgcccgtgcaaaagaatcaggtgagttataaccgtactttattgcaatatcaatcacttttacattgctgtctttcagttcaaaagctgcaagagtaagacgtctgcgacgaatatattccgataatgaaatacctgcaaggaaggaaaacatccttttaaaatgatattcagagcagaaagcaagctttgctgcctcttgaaaatcaatatcattagtgaggttttcttcaatatactttaacgccctattcatacttttaagcaaatccatttatttggcctcctttaaccaaagaataacaggagtgaaatgtatatatccgacattctgtgcacagttttgcaggatgacttagatgaaataaagtaagtgattcacttgtatttgtacaggttttattgaagcatgctgttcataaaaaggcatcaataaaagaaagttataattgtcttataaacggcacattcatataattgagtgaaaaaggatgcgtatcatgcctatcaattcttttgaaaactatccgatgagctggaagccatcgattgataaagctgaaaagcctatttataaagcacttgcagggcaattggaacaggatattttaaacggagttttattacctggaacaaaacttcctccgcagcgagaattggctgattatttagatttaaatgtgagtacgatttccaaagcatttaaagtgtgtgagttaaaggggctgctgagtgcgactgtagggagcggcacatttgtatcgtatgatgcgttgtcgaatgcgtatttacttgaggatacaaagccgacacatttaattgaaatgggagcaatacttccagatcacgcttcatatgagcccttgttacaccaactgaaaaacatgattcaggaggaggattatgaaaaatggtttagctacggccgggcaggcgaaagcctttggcaaaaagatgcagctgtaaagctcatccaaagaggcggatttgaaacatccgttgatcacattttatttgcaaatggagggcaaaatgcgattgctgcgacattggcgagtctttgtaagcctggagaccgcatcggtgttgaccatcatacgtaccctggattaaaaactgttgcatcattgcttagtgtgcaaatcgtaccgataaaatcagaaaacgatgaaatgagtccggagtcacttgaatatgcgtgtaaaaacgaaaatattaaaggtttgtatttaatcccggattatcataatccgacgacttcctttatgtctgttgagaatcgaagaatggttgcagacattgcaaagaaatataatctatttgttattgaggatgcatcgtaccatcttctcaacaaaaatccgcttccggcactcgcctcattcgcaccgcaacaggttattcatattgcaagtttatcaaaatcgttagcgccaggcctgcgtttggcttatgtagcagtgccgagacaatataaggagccaatatcaaaggcgctttataatttaaatataaccgtttccccgctattagctgaacttactgctcgcacgattgtatcaaatcaatttgaagtcttaattgagagtcatcgtgaacaaaccattcgcagaaatcaactcgtaaaccgatatgttgcgggatatacatgtttaggtgttgaaacaggcatttttcgttggttgttgttaccgggtaaaatgtctggtgccgaatttgaagaattggctgctcgacatggcgtgcaagtgtatgcggctgaacgctttgtagtgggaaatagttgtcctgaaagggctgtaagggtttctgtctgtgcaccaaaaacacttgaagagcttgaacaaggattaatgatcctgagacgtttgctagacgatcttacctaatattgtttgccatacaattatgacattgtatggcttttttgtgcgtgttatgatgatccacatctagagggaggtttatacaaaattggcttttagaaaggaaggtcagatgatgttagacaaggacagcgtaaaagcaatagatgttcaaactgcttcattacaaagctacatcagttcaccagaaaaacaaaaatcgttatacaagcgtacactattcgttgtgagtatctcacaaatttttggcggtgcggggctggcggcaggagtgactgtcggtgcgcttattgcacagcaaatgcttggcactgatgcgtttgctggtctgccttctgcgttatttactttagggtcagcaggatctgcattaattgttggaagactttctcaacgttatggccgtcgaacaggtctttcggctggctttatgattggcggacttggagcaataggcgttattatggcagcaatcataaatagtattttcttgttatttatttcgttgcttatttacggtgcaggtacagccactaatttacaggcccgttatgctggtacagacttagcaaatcataagcagcgagcgactgctgttagtattacgatggtttttactacatttggcgcagtggcaggtccaagcttagtgaatgtgatgggggatttcgctctttctattggtgttccatcacttgctggccctttcattttagccgcagcagcatatattttagcaggtgtggtccttttcattatgcttcgtccagatccattagttatagcaagaacaatagaagcggcaaatgaagagcctggtgataaaggacatttggcggcaactgagcatacagaaaacaaaaaagggataatcgttggggcaacagttatggttcttacccaaatagtaatggtagctattatgacaatgacaccggttcatatgagacatcatgggcatgacttgggggcagtagggcttgttattggttttcatataggtgctatgtatctcccttcactggttacaggtgttcttgtagataggttgggacgtaccgcaatggctatttcctctggaacaacgttgcttttggcaggtgtaatagcagcatttgctccgggagattctatggttcttctcgtcattgctctttctttactcggattagggtggaattttggtttgataagcgggactgcccttattgtagattcaactgatagtgccacacgagctaaaacgcaggggacagtggatgttctgattgcgttgtcaggagctgctggcggagcattatctggaatgattgtggcagggtcaagttacctggcattatcatttactggagggatgttgtccttattactcattccagtggtggtatggtttaggggacgataaaggataggattgtttaatttacattaatttgttatattgttagataaagtctattgcgtcgtctaataatctaactaactatagttgctccattaaatctaaatcagcaattttggtataaagatttgtgaccaggattccttatagctgtgtcactcactgcatattctttaattgaatcacataaaatggttatcggatttgaaaaaggcaggattactcgctttaggtaaaggagtcatcacgttgttaaaaaggttttctcttgtttttgttacactaatgatgtctatcgttgttgttttagcggccgctaaagagtcgcctggagattatgtcatctcatttgatgaacctattatcttgatgatctcaattggaatcgttgtatttttatttatccctccattagtcatgtccttttttggcaatttggttgtaagaataatatctggtgtataccaatgttttatcgttttcacttttctggggctcattccaattggatttcttattcccaatggctttttgacaattctagtttctattgcaggaactttagtcagtatagctagtgttgccgtaaccttatgcattggcaagaataaaaaagatatataataattgaattgttattttttcagattgtcagtgaaatagtaaaacaagatgagaaggctttgtgggccttcttttttttgttgttgcatcatccccactttaagcttaatctattgaataataagagaaggaacctatagaagaataaaataaataacgagatgtcaaaaataaaactggacttcattattatcaattcacgtaaatgtaaaaagcttggaaagaggggaattctttcatgacaaatagcagaacgaatccgaaggttgatgaatttttaagtaaagcgaaaaagtggaaggaagaatttgagaagttgagaaccatcattcttgactgtgagctgactgaagattttaagtggatgcatccttgttacacatacaataataaaaatgtcgttttaatacatgggtttaaagaatattgtgcgcttctgtttcacaaaggcgccttattacaggataccgatggaattctcattcaacaaacggagaatgtacaggcggcgcgccagattcggtttacaaatgttcaggaaataaatgagctagaaaacattttgaaagcctatattcacgaagccattgaagttgaaaaagccggtttgaaagtggaagttaacaaaaatattgaattgaacattcctgaagaacttcaaaataaattcgatgaaatccctgcattgaaaattgcttttgaagctttgaccccgggacggcaaagagcgtacactctttatttttctcaagccaaacaatccaaaacccgagaatcgagagtcgaaaaatatgtgcaaaaaattctcgatggaaagggattaaaggattaggcacgccaaggttcaggctaaaggaatatcatcatagcgtaataagatcctttctatagaagaaaaacaagcatagtaagatgcttgtttttttcttaggacaacattcacttactgctgaaatgcttctaacattgtatgccactagacagcgttataaaatattaatgcaacacctagaaatagctcaatggtacggctcatcacatttagaatgcctaggagaactaatagaaccggaagatttttagcaagttactacactccaaactttgtttttgtattaatataccttattaaccattgtttttagtcaggtgcagacaaacgaatactgattaatgaatcatcatgatatcaatgagccgtttgattttttcatcgtcgcctgtatcaacgtacactgtttttctgttttttatgatactctcagtcacttccctcatgacgcctttttctatatcatcagcggaatcccagcgtaaaggcacattatatacatgaattgtgccatccccattgccatgataagtgactgatccatccactaaacgagaacctgccaactgggtcacattttctggatagctggcacttgtatcatcattaggattaattggctcgccagccgaaatatgtcgaacattcaattcatctatctcttgattaggtccaagttgaagccaaactctggcatattcaattttttccgaagagtatgctgccaatacattgtcttctttgcttttctcctctgctgaagaggtatcatttgcagcttttgttgcggattcttctgattctgttattggctccgcttcatccttgcgtattttggtgctgtcttcagtctcagtgtgtttttcgtcagtttgtacagcagaagcttgatttgaaggttgttgtgcttcttcatccttactgcccgtacatccagcaagcaaaatcatgagcagcagggcagtattgcaatagcatatcattctgcatttcttcattttttcattcctctccattaactcaggtcagcttcatatataagtttatgtatctaaatattaccatggaatagataggatgatgttgaaaactgtttaagaagaggaaacgatcttgaatagcatcgcgaaaacttaagaattcttaagaagttttgcccctttttcttcaggttttgaatgtaaagtgggatataaatgcaaaacaaatggagagattagatatgaaacgtctgttattcttatttcagtatatagtgaatccgagaactgttggtgcgatccttcctagttcaaggtatcttggagataaaatggtggatggaattgatttcaagaaggctgcatacattgtcgaatacggtccgggtacgggtgtattcacaaaaaaactgcttgaaaaaagaagacctgaaacgactattttattagtggagcaaaatgaagaattttatttactattgaaagagacatttaaagacgaaaagaatgtatttattgtaaatggatctgctgaaaatagcagccagtatgcaaagaattatggtatgccttatatagactatgtgatttctggccttccctttgcaagcttgccaaaaactgtttcagccaacattttattagataccgcaaagattttaaaaagagatggtgaattcattacttttcaatacactatgttgaaaaaaccgttttttgaacagttttttaccaaaatagatgtaaaaagagagcttagaaatgtaccgccggcttatgtctttagctgctcgatgccgcaaaatgatttggaggaattatatggagtcgaacgttcttattgttgatgatgacaaagacattagaaatctcatctctgtttatttagaaaatgaaggcctgtacactcaaaaggctaaagacgcaatcgaagctttaaacctgctggaacaaaaagaatttgacctgatgattttggatattatgatgcccaacatggatggtattgaagcatgtatgaagattaggcaagaacgaaatctgcctattatcatgctttctgcaaaatctgaggatatggataaaattcagggacttgccgctggtgccgatgattatttatcaaaaccgtttaacccattagaattaatcgctagggttaaatctcagttaagaagatataaaaaatacaatactgatacaagcagcacgaagaacatcattgaaattggtgacttgaccgtaaatacagatacacggcaagtatgggtgcggggccgggaagtcaggctgaccccaaaagaatttgatatactcgaacttctttgcatgaacaaaggaatggttctgagtgtggagaagatatatgaagcagtatggaaggaagacttttttaagtcggacaacactgtcatggtccacattacaaaaatcagagataaaatagaagaggattccaaacatcctatttacatcaaaactgtttggggaacgggatataaaatatgagaaagtttggaaataagctggttgcaaagcttcttggcgcgattgcaattagttttcttgtttcattgggtatgatggcactcattatattatcgaacgtctatctacaaaagatgaattatctcaaagagtttagcatccggagcagctattttatgatactgcttcagttttcggcagctattcttacttttattgcagttttttttatcatggcacggaaaaaaatattatatttgaagcttattactgagagtgttcatcatattgctaatgggaaattaggcttgaccattaggattgaaagtagggatgaattgacccagcttgcccaaaacattaatgatatgtccaaagagttagaaaaaaagtttgaacacgaaagacaattagaaaggtcgaaaagtgaactgatttcaaatgtatcccatgatttaagaacaccattaacatcaattatcggatatttggatttattaaaaaaagggcaatacgacagtaaagcgcaatttcaggaatatcttcaaacgattgattcgaaatcgcaaagactgaaatacctgattgatgagctgtttgagtatacgcatttatcgagcccggacgttaagttaacctgtaaaaaagctgatttgtcaggtttattggaacaaataataggagaatacattcctatttttgaaaaggaacgactaagtgttcaaaaatcaattgcagaagacaatgtacctgttgtaatggatatagaaaagatggttcgcgtttatgataatctctttatgaatgcgataaaatacagcaggaaaccatctgaattattcataagccttgagatcattggtgacaaagcacttttgaaaatttctaatcaagttgagggttttccggctgacaatatagacaaattgtttgaacggtttttcaggggtgataaggcaagaacagatcaacaaggaagcggccttgggctagccatttcaaaaagaattgttgagcttcataatggtaatatccatgcggattatagagagggctggatgagctttattgtcgaacacccattgtgtatataaaagcttatggaggaaagtttccataagcttttttctttagaataaaacttaagaaaccttaagaattttacggagagtttcttcattcttattgcttatcatgtaggtatggaaagtgaggagagtgtagaaattgaaaagtaaatttcttattatagctttgtggtttttagccatttatatagcaaaggaatatcatttactgtcactcgatatggatgatttacaggaatttatatcgttgaacacaaaatacgcaatgctgctgtttattgcgctctggatcattagacttctcttttttattccaggtgtgactctcatgtttttgggggagtatgctttgatccggttgtgagctttatattgtcgatggctggcatttttttgagcgaaaccttggtttacgttttttcaagaatgttttcaagcgggaacatgatgaaggatttagaacgtaaatatccagagttgaaaaaattattggagacttacaattataagtttttggcgctggggatgatttgtccaatagctccaacagatgtcgtttgttttttatcggcagctgtaggaatcaagtataccacttacattttaacggttatcgttacgaatatccctttattgatattttcgagtttcattgtgatcaattttagtgagtcattaatgggaactgtattggttgtcgcatcatttgttttggtttctattgtatccattaaaatgtggaacacccttaagcataaacggagcacatagaaatgccacgagactaaccatttatagcttataagcacctgtagagatttaagttctttcggtatccaatagtaccaagggttaacagcccttggtattattttctgctgcacatatataaaccctccattttcgcttgtagatccttttttatttttgtattttaggttgaatgatcaccagaagaaaaatgaacgcatgatctgaaaagctgttttgccgcaaaataaataacaccccgatgatcaacgataacaatcccgctactacgatatattgtgtgtctgattttgattactgtatataatcgttttttagtaaatgctctttcattttttgtatagccttcgcttcgtcagatccatttgcgtgtatatatattttggttccgggtttaattcctaaagccataatgtccatgatggcttttggcgcttgtttgaggttaacagttttcccttggtattcaagaaaaatatctgatgtaaaccgatgagctagtctgactaacagggtagccggtctcgcaaaccctgtttccttaatgatcgtaaattgtcttttaatcattcttcacctcattacattctgcctcttgacggatttatagttgggttgcagatcaaatttgaatttagagtacctttaggataagtgatctaatttcatcgaaataacactctttctttgtgtttacaaaataattctcaactaactaaaatggacaatgacttcattcgagaaaaaagcatgattcactatcagcttttgtttattattgtaaataaaaacatggtgtgtacaatggttacattcaggcgatttgttgattattcaacattccactctaaattgttgattatcttaagaaagtttggtgaaaagctatgtccaaagtggatagaagaataaccaaaagccaagaggctattaaaatagctctgattgagctgatgactgaaaaaagttttgatcatattacgattaaggaaatttctgaaagggcaaatgtaaaccggggaacaatctatcttcattacttagataaatttgatctattagaaaaaattatggaagagcatataaacaatatgggggatttttgtgagtcggcagctgaaatggactggattgaatcgactgtacactgcatggaataccttgagagtaattatttattcttttcgacgatgttagccagtgaaggcgctcgatattttcgcagtcagttccttaagtttaatatcgaagagttcaggaaagatgtagatgtaacgaaaggcaagaattacggccaaagtgaagatgtcattgttgaatttatagcaaatgcttacgtaggggtagtggaatggtggttaaaaaacgaaatgccttatccgcctcgtgtcatggcagaaaaagtgggggagttattagagcggattttataatggaggcaggaaatgggtgttgacttatttgtctaggcgggagattcaagtctcctcgatcgcatacaaaataccaagggccagcaacccttggtatttttataccttcatgcatttttgaagtttatgcttaaaggtctgccttactttgcaaatcgccgagctgctgcaacgcacatgataacggcgatattcactgctacgagtgcccagcccactttctcgtgcagaatcactgaggcaagcagcagcccaaaaaaaggctggagaagctggagctgcccaaccgccgcaattcctccttgggcaagacctcgataccagaacacaaagccgatcagcatgctgaataaggatacatatgcaagactgagcagtgcgggaacgccgatgtccgaccatgagtccggcgtaaaaaagaacgacaagggcagcataagaggaagcgacagaacgagtgcccatgagatcacctgccaattccccagacgccgtgaaagccttgccccttctgcataaccgagaccgcatacgacaatagaagccagcatgtacgcgtcgccaagcggggatgaacctcccccctgaatgagggcgaaacctgctactaacaagctgccaacggttgagaaaatccagaagacggggcgagggcgttcacccccgcgcagtacgccgaagaccgccgttgcaagcggaagaagtccaatgaagacaatggcgtgtgcggaagtgacatgctgaagcgctaaagctgtcagcaacgggaaaccaatcactacgccaaacgctaccactaataatgaaatgaggtctcttttggcaggatgctgctgccggaagatgagaaggagacctcccgccagtacaccagctatcgcagcgcggcaaacggtgagaaaaaacgggtcgaagtctgacacagccaaacgggtcgcaggcagcgagccgctgaaaatgagtacgcctataaaaccatttatccagccatttgttgttttgttcattataatcactccacatatctttcttgttcattgtctgtattttcttaacaaaaccagcagctaaggattacaatgactataaactggaattggccttttttaaacggccagttttcataaaaaaatgcataccagttaggagaacaacgtgcaaatggatatcacgccttttttgaatagaactctggatattccgctttatcagcagctttatcggtattttaaagaaaatatgcatcggggccgtattcaaaaaggaatgaagcttccttcaaaaagactcctggcgaatcagctttccatcagccaaacgactgtagaacgtgcctatgaacagctcgctgctgaaggttatattgtgagcaagccaagaagcgggtggtttgctgattatcatgattctgattttgcttatgatagaatgccaagcacaacacccattcaacaagaagcagaagaaaataaacaatggattgattttcattatggaaatgtagattcttcttacttccctttttccgcatggcgaaaaagcatggtcaatagcttagaccaatatggacacgagctttatcggccgggacatgttttaggagagtttgagctgagaacactcattgcagagtacctgtatcaatctcggggtgttcattgcggccctgaacaagtgattataggtgccgggaaccctattctgctgcaaatcttgtgccaagtttttgagccgaatatttctatagggtatgaggatcctggttatccaagagcacgcaagatttttgaagccaaccgcatgaatattgttcctataccagtcgatgctgaaggaatctgtatacagaagatcaaagaacagcagccaaaccttgtatatgtcacaccttcccatcaatttacgctgggaacaatcatgacgatcaacagaagaattcagctgctcaaatgggcggccgaacatcaatcctttatcatagaggatgattatgacggggaatttaggtacacaggacagccggttccttctcttcaagggcttgatcagcataaccgtgtcatttatatgggcactttttctaagtctcttttgccctcgctgcgtatcagctatatgattcttccttcacctcttttaaaaaaggggcatgaaatcacatccttatataagcaaacagtgtcctgccacagtcagctaaccctagctgaatttataaaaaatggagagtggcaaaaacacatcaacagaatgagaaaactttaccgcaaaaaaagagccattgtattagaggcagtgcaaagggaattaggagagcatgtcagaattcgcggagaaaactctgggcttcgtatcttacttgacgtttatttgccatttggcgaaaaagagttaattgagaaggcgaaaaaacatggagtaaaaatttatcctgtttctctttcttatcaacatcatcctcctgcaaaaacggtctcgctcgggtttgcaggggtttctgaatccgacataagagaaggcataaaaaaactgaaggctgcctggaagatatgagggagctttcagtttagcaaaaaggccaagtgacgactaagtgttgagagctgttcaatattatttaagtatatgatgagtgcctgcagtccaggccacgatacgtctgtttagcgaaaaacagaattttttatttgctcctcacagtgctaaaataaacaaaatagacaattgaaaaaatagaggtgtaagaatgaagttagatgagtttacaattggccaggtcttcaaaacgaaatcattaaaagtatcaaaagatgatattatgcggtttgcgggtgaatttgaccctcagtatatgcatgtagatgaagaaaaagcgaataaaggcagatttaatggaattatcgcttccggcatacaaacactggccatatcttttaaactttggattgaagaaggtttctatggagacgatattatagccggaacagagatgaatcatatgacattcataaaacctgtatatccggatgatgaattgtttacaattgttgaggttcttgataagcagccaaagagaaatgaattgggaatactcacagtattgctatctacttataatcaaaaagaagtaaaagtgtttgaaggtgagttatctgtattgatcaaacgataactcagaaagcccgcttttcgcgggctcgattgaagcagatgggggaaagatgttagcgagtttcctttgaaaaataagaggttaaaacatcataaacaataggcaaagaagtaaatccctcatcttctagaaaatgacctccgtgctgaacttcatataacgcagcatcaatttgttgtgccagatccttgctgaatgaaaaaggcacaatttggtcgtccttagaagcaatgacagcacggtgcttcgcggactcaatgattgtttgatgatcaaacgatccctgtgtaaattcatctaacatctttaaagtgggcaatgatttggcaaagccggaaacaagtatgattccgccaagctgttttcgtaattgaagatgttccaaaaatctcaaaatggcggggcaacctaagctgtgcgcaaccaaatacgtattttcatgtaaagtgtgctgatataaagagagtgtatccagccaatcctcaagtcttggctggagcggattaggcatgtttaaaatgtctgcttggaccccatctgcgagcagacgttttttcagccaagggaaccaatgatttgttgaggaggctctgtagccatgaatgatatagacttgttttgtcattatttcctcctaagaaatattttcattcagtataaaattcctctcattgggaaacaagtacgcacttttttgtaagtagctttacatatgaggccctccttgtgccattccccacttacacatctcatctatgaggggatacaaagatcgccctctgtcagataacgaatactctactttcagtggggtttgagaaacctcagaccgatgaataaggccgtcagtttgcaattccttaagctgtgcgcttaacattttatgggtgatgaagggcatagcccttttcagctcgccgtatctcatcgttttttcactaccctaactcatagagaattctcattttccatttgccccctataagagataaggtgtattcaaatggggcttgtttactgcggcacaggctattcattgtaatcaaacctccttttttaagtatcatatcagaataaattaggattttcggtgttgaagtttgagggcgattcacgatctgaagtgaaaggggccgcttgctcaacaggcggcacggtacatgaatgttctaagtcaaagagggttaccttactgttagttactttatttaaaaaaacgcatgtttttagctgaaaatatctattatggtatatttaaatataaagaaatatttgagaaatgaggaatggtatgaatacacccaaaaaacataagaaatttaaagcgaaaatgattctccaaatcatcatggttatcattggaggaatcatagcggcatatggactagaaacagtgctcattccaaacagtgtatctgatggaggggtgacgggtcttagcatcgttggttcacagctattcaacttgccgctggggattttgattgcagtgatcaacattccatttgtctggttaggatataagcaaattgggaaaagctttgcattattatcaattatcggaatcgtatcgcttgccgcggggacaagctttttccaccacacacccgccatcatagaaggagataccctgttaattaccgttgtcggcgggattatccttggattcggaatggggctggcgctgcgtaatggcggcgcattagatggaattgacatgcttgctgtgctgctatcccgaaaactgccattcggaacgagcgatctcattctattcttaaacctatttgtgtttatctttgtttccacagtatttggcttacaaggggcattgctttcagtcattgcttactacattgcatccaaagtgattcatgttgtggaggaaggcttaagcggctctaaaacctttcaaattattacaacccaacctgaattaatggtagagacaatacgtgatcaattaggccgaagcgccacatataaagaagcttacgggggtttttcccacgagaaatttaaagaaatcacatgtgtcatcaaccgtttagaagaaaccaaactaaaggaaattattaatgatattgataaatccgcctttgtcaccgtatatgacgtagctgaagtgaagggcagcaattttagaaatcttaatcatcactaaaaaatagaatgacctttttaaccgtaactgacatgccgcgggtaatttaatcaaaaacacttttttgagggcttgtgggtgtcaccagtgaaggtctgaatcataaaaataccaagggaatcaaaacccttggtattttttctggttattagattttatcttcagctttacgtgctgcttcgagcttatcaatcctgtctttatatttttctccccagtccttcatgtgcaggataacaggttctaatgttcttccaaactcagttaaagagtattcgacttttggagggacctgtttataaacctcgcggtgaatcacgccatcccgttccaattctcttaattgcagcgtgagcatacgctgggtaattttggggtatagttttcgaaactcattaaacctttttttaccgtcaatgagatgataaagaagaatgcctttccacttacctccgatgatatctaatgttgtctccaccggacatccttcaaagtcatcagaagaataatcaatgccgagtttacgatttctcaagctgttcactcctaatagtatactttttgatactatatacattcaatgtgcgtactttttatatattaatatacatcatataatgatgtcacatctaaggaatgaaaggaatggatcatatgaaaacactcgtactcgttgtacatccgaatatagaatcctctcgtatcaataaaaagtggaaagaagccgttttaagtgaaccagatgtaactgtccatgatctttatgaaaaatatcgcgatcaaccaattgatgtggaatttgaacaacagcagctcctggcccatgaccgtatcgtttttcagtttccattatactggtacagcagcccaccgcttttaaaacagtggtttgatgaagtgtttacgtttggctgggctcatggtcccggcggaaataaattgaaggggaaagagtgggtaactgccatgtccatcggttcacctgaacactcttatcaagccggcggatataacttgttttcgataagcgagctgacaaaaccgttccaagcatctgcccatttagtaggcatgacctatctgccttcctttgccgaatatcgcgccaatacaatcagtgaccaagaaattgccgaaagtgcgaatcggtatgtaaagcatattacaaatatagaattaaacccgaaggttcgcctgcaaagatatttgaaacagctggagggtgtcgatttaacataaagattgattttggaaaatcctgtactcaccaagcaggattttttcttgttcagcagagggattttaacatatagcgaaaaaagaagaagccaccaaaaataagctatttgcttggtcctgactgcttatttttggtgatatacttatttctctgtgatgaaataaagcaaagcgatgaccggaaaagcgattccaatccataatgctgtactccatccccctgaggcatatgcccatcctccaattgatgaccctatcgcaccgcctagaaagaagatcgccatgaataatccgtttaatcgactgcgaatttcaggcgccaacgaaaaaatagcacgttgactgagcacaaggtttgcagatacacccatatctaacagaatagctgcggccactagaactgttataccgacgggggagctgctctgaatcatgaggggtaataataaagagacaacgacaacaacgagagcgattccagtggcaagcctggttaagcctcgatcagccaggcggccgcctattggtgcagcgactgcacccgcaatgcccaccaatgcgtagagtgctattgccttctgagaaaaatgaaaatcaggaccggccaataataaaggaacggtagtccagaacaagctgaaagctccaaatacaaacgcatgatagatggcacggcggcgtaagattggagtcgtgcgcagcagcttccacattgaaccgagtaaggcagtatagtttgtatttgctgttggttttctggcaggaagcacttttgataatacgatggccaggataacacttaccacggcggacaaagcgaatattgcattccacccccagatatcagcgactagactagatatcggacgggaaagcataatccgagtaataagccgctcatgacattgccaacaacccggccgcgtgcagcgtctgatgcaaggtatgatgcaaatggaacaagcacttgggctgcgattgatcccaatccgacgaaaaacgcagctgctaaaaacagtgttccatgcttcacaaatgctgttagtgtcaaagccgctgcgcttagaaggagcgatacaacaataagttttttgttttcgataatatctcctaaagggacaaggaatagtaagccggcaacgtatccgatttgggtgagtgtgacaatcaatccagcaccgcttggagaaagtccaattgccttactaattaatccgaccaagggttgtgcatagtaaagattagcaacaatgataccgcatgcagttgcgagaagaagggttaaactgggtgaaatcctctgacctgcttgtttgtttccattagccatatgaatgaactcctttttaagtggttttttgagtgtaatcatgacttctcacaagtgattttataaactgaacgttcagtttcgtcgattaataaaaataatatactaaacgttcagttttgtaaatggatttctgttttctttttttattcaatttaagtatactgaacgtatagtttatattgcgggaaggaatgatttatgtgcagagtaaacgagggcggccgcgtgatgaaggaacgcataaggcgattctctctgcagcctatgacctattgctggaaaaaggcttcgatgcggtgacagtcgataaaattgccgagcgtgcgaaagtgagtaaagcaacgatttataaatggtggtctaacaaggctgccgttatcatggacagctttctttcgaccgcgacggacaggctgcctgtgcctgatacagggtcgtcagtacaagatatagtaacccacgccacgaatttagctaggtttttgacaagccgggaaggaaccgttattaaggaattaataggtgcagggcagttggatgaaaaattggcagaagaatatcgcacgcgatttttccagcctcgccgcctccaagcgaaaggccttctagaaaagggaattcagaaaggtgaattgagagagaatcttgatattgaagtaagcatagatctcatttacggaccaattttctatcgtctgcttataacaggggatgaggtgaatgattcctatgtgcatgatttggtgatgaacgcgtttaagggagttcaagctacctctgctacagagagtatgtagctgataagaactgcaaaagctgcggattatatgacaaattggttccatcgtacgtgaaatataagatttttgttgctgagcggaatcgagggaaaagttctcttatcggatgtcgaaaaagaagtcattcaatcgtgaatacataacatcatattattacattccttttcatcgattggaacaagggttctatacttcaatggaatatcgcaaagttggagtatttaaacaacaggggaaaatcgatggccattatgtaggtgtcatggcaatcgaaaaaatacttgcaatgtaaacaggcctctaaagagacctgttttttaatatccagatgattgtctagtttcagcttgggctctatgactactcccataactgaaatagtctaatatttataccggaatatttgatgttccaaatataagggattgtttatataaataaaagtttatataatgacgggggcgctaaggaaacgcggggagcgactcaggttttgttcgaagttttgatccttaagatatacggagcgctacatatggaaacgtaaaggggaatgtagaatcatttggcgtgtatataatgatttgcttatatattgatttgggaaggaggagctcatatgacgattgatgttgcggcgatgactcgttgtttgaaaacgcttagtgatcaaactaggcttataatgatgagattatttcttgaaaaagaatattgtgtctgtcaattggttgatatgttcgaaatgagccagcccgccataagccagcatttgcggaaattaaaaaacgcaggttttgtgaatgaggacagaagaggccaatggcgttattattcaataaatggttcctgtcctgagtttgatacattgcaattgatcttacatcaaattgatcaggaggatgaattgttaaaccatatcaaacaaaagaaaactcaagcgtgttgccagtaaggaggcattagattgacatcaatgattttggcagtattcatctttttattaactctagtattggtcatatggcagccgaaaaatttatctatagggtggtcagcctgtggaggcgcagttttagctctaatagcaggtgttgtcaattttcatgatgtgttaactgtgacagggattgtttggaatgcgaccttggcttttgtggccatcatactgatatcgttaattcttgataatatcggtttctttgaatgggcagcgcttcatatggctaaggctgcaaaaggaaacggtgtgcggatgttcgtttatgtatctctattaggagctatcgtcgccgcgttatttgcaaatgacggtgcagctcttatattgacaccaatcgtattagcgatggtcagagcattacattttaatgaaaaattagtttttccttttatcattgccagcggatttattgcggataccacttcgcttcctttagtagtgagcaatttggtcaacattgtttcagcggactattttcatattacgtttattgattatgcatccagaatggttgtgccgtacttgttttcgctgctggcgagcatcattgtactttaccttttctttagaaaaagcataccaagacgctatgatctgactgaggttaaaaaacctgttgaagcaattaaagatcaaaacatgttcagactgtcatggtatatcttagggctgctgttaattggatattttgcaagtgaatttttttctatccctgtatcagtggtagcgggcagcattgcgatcattttcttaatcgctgcgcaaaagagtccggccgtccatacaaagaaagtggtgaaagaggcaccgtgggctatcgtattcttttcaattggcatgtacgttgttgtgtatggtgtccgaaatgccggattaacggatgtcctttcagatgtgattcaagccgcagctgatcaaggattgtttgctgggacaattggaatgggctttattgcggcgattctttcttccgttatgaataacttgccgactgttatgattgacgcattggctattgccggtacagatacacatgggatgatgagagaagcgcttatttatgcaaatgtgatcggttcagatttagggcctaaaataacgccgattggttccttggcgacattattatggcttcatgttctttctcacaaaggtatgaagatttcctggggcacgtattttaaaacaggaattatcctcacgatacccactttattgatcacacttgtcggcctgtatatttggctgctgataatccattcttgtttctaaaaggacaaggtcactatatcaaggaaaacaatgcactggtaactcttgacgcagccaaatggctgaagggtgggggagaaaataccttggggctaagtggaatgtgtacagcgcaggaatcgaagctcatggatgacatcgagtgctgttaaagcaatgaaagaagcagggattgatatttcaaatcaaacatcggataaatttgatgatccggcaaaagcacacggaacagaagaagtgtttccaaagggtccgtgatgaaattggtgaccgtttaaaacagtttgctgtaactggagaataaagaatcgatatactcagcgttttcttgggttatataatgcaatgtgttgttcaacaggtgtctgcgggctgagtgcaaacacctgtttttgttttttatttgtctgagattcgtaacagggaagttatttagctggtgacagaggaaaattgattttgtgaacagaatcatgaaggagacggtgttttaaaggagttgtctgttttgcaggaattaacaaaagaaaaatacagtagcttaaaaacaatgtttgatgacaaatattgtcccacatttgtctattcaatattagaccaaaccattccgggagctgtttatgcagatgatcaaacctttcctaaatcgttttttataggaactgaatcaggcatttattttattgcgggagaccaagggaatcgggattttcatgatttcattgcaggatattatgaagaacaagtgaaatcatcaaaacgatttaccttgttttcttccagtgatacatgggatagcgtactgaaacccatactgaaagatgacttaaaccaaatgagaagagctgcattttcttatcaaccaaaatctttcaaaaagactttgcaactgccaaaggggcttgtattgaaaagaattgacgaagacatcatttcacatagcacagcgtttaacagcgcgtattatgaggagtattggaattctgtctcacagtttgcttcaaaaggttttggatttgccgtattacatggcaatcacgtagtaagtgagtgtacctctatatttttagggcataatcgagcggaaatggatatctatacacttgaagaatatagaggactggggttagcttattgcgtagcaaataggtttatagcgttttgtatggaaaatgggattgttcctagctgggattgtgatatttgcaacaattcgtccattgcattagcagctaaactagggtttaagacggtaacggaatacactatttactactctggctaaccttaatgaaagaaccttaaaaggagataccaaccgatgttggtatcttttttgttttagagtttttttacccttttagcagaaaaatgggtgatgaaaatcttattcattttatttacttttaggtaggtaaaacataccccgccaactgtaaccactccgcctagcagagagagcagtgtgggtatctcgccgatccagagccaagatatgatcaaggctaaagccggtgtaacataaagtgaaagggttgcttctgaagcaccgacgagtgaagtgacatatgctagtgcgaagtaaggaataaccgtcggcaataatcctaagtaaacgatagacaaagttgcgcttattgaagcgttcatcatctcttcgcctaagcctggcagaaacacaagcataggtattgttccgccccaaatggtgaatgtaacgaatggaataaaaccatatttttttatatagcgggcttgaaaaacgaaataaatactctccgaaaatgctgccagcaggatgaccaagataccgctcattgaatatgtaaagtctcccgccccaaatgcaatcaataatacacccaataaactgatcatagagccaagccatttcgtaaatccaaaatgctctttataaaacaggcgggatagcatggctgagaagatcggtgccgtagtaacgagtaagcttgcaactccggcactaactgttttttcaccgatgttcagcaaaatgtgatagaatgcaaatcctaaaaaccctaaaagaaaaatggcaggaatgtctttcaagtcgggtaggcgcatctgagtcaaaacagcaaaaagcaataatgccatagagccgattaacaaacgaaataaagcaaggtgttctggcgtgtacccttcaagtcctgcgcgaattcccggaaaagcagatgcccataaaccaatcatgagactatgagatatcattatttgaactgttttctttcgcattcctctcactcctctttacaaaaaccaaccagttatttaatgtgtttctatactaataaagatttgatgatatggcttcaaccagttcaatagattttgacccaaccaatttattttaaggagaccgattctatgagctttccagaagaaaaaaagatgaaaaagctccctaagtacagacaaatcgttcattttattaaagagaaaataggaaatggagagtggccgattggaagcaagattccaagccagcgcacgcttgcaaaagattttcaggtaaatcggagcacagtgattacagcgttagaggaattgatggccgatgggctaatagaaggcacaatggggaaaggcacagttgttatcaacaacacatggacactgatggctaagaattctgctcccgattgggatcaatatgtcacctctggcattcagatgccaagccgaaaaatcgttcaagagataaatcaatcagaatcaaatacagaccttatacagctcagtaaaggtgaactttcagctgagatttttcctttggctgttatgaaagagatgatggggaaggtatctcaacacatggaggcattcggatatgaagaaccaaaaggttacttacctttgagggaggcattaagcaactatttaaaaaccattggaatcaacgtctcatcttcttccattctgattgtctcaggagcgttgcaagccttgcagctgatatcaatggggctgttacaaagaggatcaaccgtttatcttgatcagccctcctacctttattcattacacgtatttcaatcagctggtatgaagctgactggacttcctatggataatgaaggacttttgcctgaaaatgttcatttaacaagaggagagcggggaagggctatcttatatacaaatccatgttttcacaatccgactggtattcttatgtctaaaaagcgacgggaagaaatcctagcagtaagtgagaatacacagcttcctattattgaagatgacatttatcgtgagttatggatcgatgaaattccgccatatcctattaaaacaattgataaaaatggacacgtactgtacataggaagtttatcgaaaacattaagcccaggtttgaggattggatggatcgtcggaccggaaccggtgattgaacgtttatctgacattaaaatgcaaacagattacggatccagttcgctatcccagagagtagcggcagagtggtttacttccggccactaccagcagcatgtagaaaaggttaggcagcaattaaaggtgagaagagaattggccttgagtgctttagaaactcatttgaaagaagtggcgacatggaatatcccaaaaggagggttttttgtctggataaaaatattgccttccatatcaatgaaattactttatactaaagccttatcaaaagggattctgatcaatctcggcagtatctatgctcaggaaaaagggaattatattcgcttatcatatgcttatgcatctcttgaagaccttcaaaaggggatttatgagttgggtttaatgattaaagaattggcaagcaggtaacttttatatccttaaatggatgtttcactaaaaaagagatcaagcctaatgatcgcttgatctgataataacaagggttactagaatagaccaaatcatggttcggtcttaaaataatcatgtctctgaacgaaaagtctttccgacttctcttcctaaaccaaagtagtgtctgaaattatagataagcgggctccatttggaagggttgatatggttttcgtccagaatgatactttcctcggcatgaaaatgtagtgcctgcgtctctacaattgcgaatgacgattcatattctggaagccgaatgtgtttcacttcggcttcgatttggatagggcattctttaattcgtgttggtgatactgtttttgattgtaaaggcgttaaccctgctgcctcgtatttttcttttttatatgtaaatccgagctgcttctttaaaggcggtatactcttttttccgctataagatgaaattctttcaacgttttcccataaatccgggccaggcaagtttatgacacactctttgtgtctttccaaattgtcgatggcttttcctcccagtcctactccaaggattatataatgtccaagagcccaagaagaagacataggactaatattagtggttccatcctcattcaatgtggttagaagaaatgtcgaggtaccataatacatgatcttgggtttgatttccttaaatcgacgagtgtcttgttttttgatgtccaacgttttttcctccttgtcacgcttacatttatattgtaaaggattaacatttcaactatcatcgaaatatgaatgtaaggaggaaaatcatgaatcctaatattgcaaaaatctcttcgttgctatcagatccctcgcgttcttccattcttctcagtctgatggatggaaggatacaccctgcgggagagcttgcatatctcgctaacattaaacctcaaactgcaagttttcacctgaataaattgcttgaagcaaagctgattagcgtagagaagcatgggagacatcggtattacagattggctgactcagatgctgcaaatgtgatcgaacaattgcttcatattgcgcctaaagcaaaagtcacatctttaaaagagtcaaaagagaaaaaggacttgcatttcgcccgtacctgttatgatcatttggcaggttatgtgggcgtgcaaatggcacattcattagttgagcaggggatgttaaaaaaagttgatttaaactttgaggtgacttcagagggtgctttattcttttcaaagttaggcatcaatgaagagcaacaacggaataagaggagagcctttgcccgctgctgtttggattggagtgaacggcagcatcatattgcaggagcattaggaaacgccctattggtgcgcatgttagaagaagagtggatcgttcgtatgcctaaaacgagagcgattaggattacacaaagcgggaaaatcgcgtttgaaaagcacctaaacgtgaagatttaggatgttgaagcgaaggcacgatatccaggaggaggagtaagatttgttctaatcttactccttcttcttattttgaagcagctcgattccccattgcaatagagatgcggttccaactgtttatttgattaatgatcagaacaaggtcaacataatgtttttcatcataatgttcccgcacccgatgatatagctcatcaggaacccttttagatggaatgagcgtgatgtgttcagatagttcgagagccgctttctcttcaggtaagtaaaaatcacattcattccaagcatgtaaacagtaaattcgctgttcagtttcccccattttgcgggcatcggacgtatgcatatctatgcagaaggcacagccgttgatttgagagactctgattttgattagttctctcgtcgttcggttaattgaggattgtttcgtgtatttctccatatccatcatgattttcataccttcaggtgcaatctcatagtaggacactctttgactcataaggcaagactcctttccattgaatacctagattgtatcccggtattgatcattttaccaatgtgcggtttgaatgacagctgtttcagcgtcttttggaaagaagtttctttgaataaaaataagggtagccagcaatgatgagtggggctgctaatgcaagcagtatccatgagcctgattggctgtctctagtgactctaatgaatatataagtaccgatcagaaaatataataaagcacctagaaaccaatacatgttcaatcctctttttccttgctttttggttgcgcatttttgtctgtcatatggcttaatcgatcagggttctgattttttaataccttttcggtccggattccttttctctttaatgataaaattgtgagatcaatcgatttcaatgatgatcattccttcaatgaatagtaagttccttatgattttaaaggtaaatttgaaaagataaaacgtacatagaggcagaacgttcatgtacgtttgggcaatgatcacttattggaaactctaatgtttccctgcacctgatattgttgtgttccttctcttcctataaaatgattggatacatgtatgtttgcacgttgaaatatgggttcgattttcatgaatctctattcggtgaaacaggtaaaggaagtggataaggtttgcttataaggaatccttttaaagataaatattactcacatgataggcgggcattaaacatgcttgcactcagagtgccgggcctggcttttattctcatgatctatatagcctctatcgtgctgcaatttgtttctgggggctggtccattttattgctttatgcgtttaccatattaatcgccatttttgctttgcttcattggcactcatatcgctgggttaagaaaagagtgattctgtatttcgcggtacaaggtttgatcacctttgcacttgctaatctcatgactggcttctttatacttgtcattatcggcctttatgcatttttaattggacaaatcataggaatggcagacagaagaaggacttttctcattctttatctattgctgctgctggtcataaattcggcgtttcaccttcataaaggtgaagttttgcattttattgttattgctgggccaatcatgattgtcatcatcacttatgctgcaacattttttgcccaagtcgatgaaaaaataaaagctcaattgactcttgaaaggctggagctggctcatcagcaggtagaacagctgacgctgcagaacgaaagacagcggatggcccgagacttacacgatacgcttgctcaaggtcttgtcagtttaaatatgcagctggatgcgattcatgttcatctcgccaaaggcaacacagagagagcgaaggaaatcatacaacaatcgatgaaaagagtgaaaagcacattagctgatgcacgttcagctattgacgatctccgcagcaaatcagaagaaatcggtgttttaaaagaaagaattacctcgctaatggatcattttatagagtcgacaggcatggcttgtttattagattacagattgcatcaggtgctggatgtgcgtacagctgaaaactgttattacatcattggagaatgcatgacgaatgcggcaaagcatgctgaggcgaaaacaatctggatatccatttgggatgatgaaaagggaaggctccatttaacagttaaggataacggcaagggatttgatgttgaaaaaggaaagaaaaagagaggacattatgggcttcttggcatacaagaacgcgtcagggcaataaatggccaattcaatatcaagagtacaaaattgaaaggaacacaaattgagatcactgtaccaattcagggagagatgcaagatgaataaggttttaatcgttgatgaccatcttgtcgtgagggaaggtctgaagcttttaattgaaacgaatgatcaatacaccattataggagaggcggaaaatggaaaagtcgcagtccgtcttgcagatgaattagaaccggatatcattctgatggatttgtatatgccggagatgagcgggttagaggccattaaacaaataaaagaaaaacacgatatccccatcattattttgactacatataatgaagatcacttaatgatcgaagggattgaattaggagcgaaaggatatctgttaaaggatacgagttcagaaaccctttttcacacaatggatgcagcgatcagaggaaatgtgctgttgcagcctgatatcctcaaacgtctgcaagaaatccaatttgagcggatgaaaaagcagcgcaatgagacgcagctgacagaaaaggaagtcattgttctaaaagcaattgctaaaggtcttaaaagcaaagcgattgcctttgatttgggcgtctctgagcgaacagtaaagtctagattaacgtccatttacaataaattaggcgcgaattcaagaactgaggcagtaacgattgccatgcaaaaaggtattctgacaatagacaactaaactgcatatttgaaagttgcccaaacgtacatgcccgaatgtacgtttttttcatttcattgtcaactacaatgagaaagaatgtgatcaagcaatgcgttgaaaggagattatcatgtcaaaaatgttatatacattaggaggatgggttgctcgcaatcgcataaaagcaatatgtgcgtggatcgttgtgttagttgctgcgataggccttgcagtgaccttgaaaccaagtttttctgaggatatgtccatacctgacacaccttcggaaaaagcgatggatgtgattcaaaaagaatttcctcatggtcctgataaagggagcatacgggttattttcggtgctggtgatggggagaaacttactgggaagccagcaaaaaaagcaatagaagatacgttcaaagaaatcagtaaagatgattctgttgactcgattgcaagtccttttgtgacagggacaatcgcgaaagatggcacagttgcctatgctgatatcaagtataaatcatcagcagatgatataaagaattactctatcaaacacttaaaagacagtttgaaactggctgatgatgaaggattgcaaactgagctaagcggagatgtaccgggagccgagatggagataggcggtgtctctgaaattgtcggcattatcttggcttttgtcgttttagcccttacattcggttctttattaatagcaggtttgccgattttaactgcactgattggtttaggtgtaagtattggactggttttgattgggacacaagtatttgatattgcttccgtcagtctttcattagccggaatgattggccttgctgttggtattgattatgctttatttatttttacgaaacaccgccagtttttaggcgaaggcatacaaaagaatgaatcaattgcgagagcagtgggaacagcgggaagcgcagtcgtttttgcgggacttactgttatcgttgcactttgcggattaactgtcgttaacattccttttatgtctgcgatggggctgacagcagggcttagtgtactgatggctgttttggcttccatcacacttgtgcctgcggtcttatcgattgcagggaagcggatgattccgaaatcaaacaagaaaatagaaaaacaaagcactgaaacaaatgtctggggacgctttgtcaccaaaaatcctatcatgctaagtgtatgcagcattctgattttgatcgtcattagtatcccatctatgcatttggaactgggcttgcctgatgctgggatgaaagctaaggataatccggatcgccgggcatatgacttgcttgccgaaggctttggagaaggatttaatggccaattaacaatcgtagcggatgccacaaatgctacagaaaataaggcggaggctttcgcagatgcagtgaaagaaataaagggtttagaccatgtagcaagtgtcacccctgtaatgcctaataaagaagggaactttgccatcattacggtcgttccggaaacaggtccaaatgatgtcacaacgaaagatttggtacacgatgtacgcagtttgtcagataaaaacggagtagatttgcttgttactggatcgactgcagtgaatattgacatttcagatcgcctgaatgatgcgataccggtgtttgctgtacttattgttggctttgcgtttgtattgctgaccatcgttttccgttcgctgcttgtgccgcttgttgctgttgcaggtttcatgttgacgatgacagccactcttggaatctgtgtatttgtcttgcaagacgggaatctcatcgactttttcaaaatacctgaaagagggccgatactcgcgttcctgccgattttatctattgggattctgttcgggttagccatggattatcaagtattccttgtcagcagaatgcgtgaagaatatgtaaaaacaaacaatccagtacaagccattcaggctggattaaaacacagtggtcctgttgttacagcagccggcttgatcatgatcttcgtttttgcaggatttatctttgcaggcgaagcttctattaaagccaacggattagctctttcctttggtgtgctctttgatgcctttattgtaagaatgacactgattccaagtgtcatgaagctgatggggaatgcagcttggtatttgccgaaatggttagacaagatgattccgaatgtggatatagaagggcatcaactgacaaaggaaatacagccggaaatagatcatgaacaaaagaaacaaatcagtgtgtaatagaaaaagcagatctttaatgatctgctttttttgcatatggtagtatttagaagatgaagtcggcagttaaaaggagacacttatggcgccatcactcattttcgatatggatggaactttgtttcatattggcagaagctgcatcatactagcaggcatcccaggagaagtgacatgattttttgactttgcattcactacttgatgccaaggatcttgagaatccttcttgaaaataaaggattttacaactgatcatataagaaacctaaagaaacaagcacacaaaaccagctgcgggttttgtccaagaaaaatagagtccatgagagagactctattttttgaaatgcccggctagaagtatattgcaggtctttatgaatgcaaaacactatcttataagcccttaccgtgaaatgcctgtttctgcattgaaaaaacgcattacacgttcatttacgtaagcgggttgttccatcgataaaacatgtccggcatttttaatgacttccgcctcaatatcaggaacgaatgaagaggctcggtgcagggctgagtggggatcatagatgacttcatgttcaccaagtaataataggataggaactcttgctgaacgtaattcctcatcggtaaaaacatacggaaatccgtctgctttaggatttggatttcttgatccatcctgccacattacccctgcctgaaactgcttcacaaaaatcgggtgcagcacattctgatcattcatcatccaatttaagaatgtttcaactccatttgacgctgtaaggccaagagcgtatttgtagaaatcgtgatgaaatggcaaaaacgtttctgccggactcagtatagctgcgctttttactctctcaggcatacgtaaaaggaaattcatcgtatggagaccgccaagcgaaagtccgatcatgtgggacttttcgatccccagattgtcaaacacatcaagaagccaattggcgtaatccgttcttgtaccgcttaaattctcaggaatactcttgtttttatcacctatgatatcaactgcataagttctgtatttgctgctccaatcggcgatgttgggataccacatcgtcgagctgaataatgctccgtggagtaatacaagcggcggggcatcctctgggccgcttgcaatcacatgtgtttgaccaaaacgagtagatatatagaatgatttgcaacggaccggccaaagactaaggctttcattataagtttgataatagcggataccgttgtcacttaattcgggaatactagatgaatggtttgacatacaaatgcccctcccaacattgtttaaatgaatgtgccgtttcgtgatggggaatctgattttgatataacagactttatttacaatataatacagttgttgttagacgtcaaatccaagatgaaaaggaaataaaacgattggaacagattattgaaaatcaatataacagaatattaacctcctttgtggagccgcttcattaaaaccgcaatccaaatgcatgaatcacaaaaatcacaacaggagggatcaagagggaaggcagcaaattcaatgttttgaacttcttgattccaagaatgcttagacctgaactgaggatgagtatgcctcccacaattgtgatttcattaataaggtctgtattgattgcgctctccattactttagcaaataaatagatggagccttgccaggcaaataatacaatggctgcagccgctattccaaaaccaaaagttgaagcgagcacaatggaggtgatcccatctaacatcccgtttgtcaggaggtatgtataatctccatgcaaagcggcttcaacagggcccaatattgacagcgaacctatacaaaataataagaccgcagtagataagccctctgctaaattacttttagaaaatttgttcaccagcttgttgaatcgtaattctaaattgatgatctggcctagcaaacctccaatggctaaactcacgatgaatagaatggggtatttactatcaggcaaatgctgtgtaatggcgttgatccccagcgcgactgcagcgaatcccattgcctgcatcaaaatatcctggtattcatctttaatgccttttttgaatatccccccgattatgcttcctgcaatgatcatcactgtgttaaaaatcgttccaaacataagctttctcctccaaaaatcattcctgcataaaaaataaaccctctagttagtagagagtcaagggagatcaaaacatattcatgagattatttgatgggcagcaggatttcagtcacgtaattatctaggttattcgtaatgccataatcaatgagtgtgatttcgattgagtcccctgctacttcataatgatgttctttcatatatgccagtaattttttgtagtatggttcggcttctggatgtgaccctttaaacctaatttgcagatattctcttgaaggaaagatgatttctgaagaagttttttcattttcatcttcaagaatcataaatatactggaatatttgtcaaactgttttgctttcacatttgctgcagaaatggataaaccgatcttgcctatgaatatatcttcgtttacattcaggtgggttctcaattcagctaacgaatgttcgatatcatggccgagaacatattcatgctgcaagtaagccacacgcattgcgggaagtttgatttttgaaatttgatgtaacggcatgttaacggcatcttctatatgtgtgatgcgtcgggagatctttcgttcgatgcgttccaattctttctttttgcgatcaatttcagcctgctggctttttagtaaatgaagaagagtgtttgtattttgagagttataaaaatcaagaagcttattgattggcaggcctagggccctcaaatacttgatggtatcaagccgctcaaactgttgggtagaataatatctatagttcgtttgctcatctttatattccggtttcaaaaggccgatttcatcataataccgaagagcagagattttcacattgaataactttgacacttctccaatcgaaaaaaattccttcattctaacaacctttctgtgcctatgattgatatacacacattatatagtacggcgagttctaaaggtaaagtttgcatcataaagaaaaagctccttctaaaaaggagcttttcactcttcgaaataaggatttacatggatgagcacttcttctacatctgaaaactgtcttttgatttcatttcgaatttcgcgggcaatatcgtgtccctgcttaattgtcaaatcatgatccaaagataaacggacatcaagcaatttatagtggccatgttctcgcgcgcggattctatcaattcgttttacttgatcacattgaaaaataacagctttatattcctctatcagctcgggatcaacactcttttccatgagcacatcaacagacggcctgattaattccattgaaatcttaaaaatgaggtaagcaacgattgcactggcaatggcatcggcgtacaacagataggaccatccgcgggtgtttccgatgatagccaacaggacgccgataaaagcggcaagagaggcaacgatatcgcctttatgatcgtacgcaatcgctataatcgctttgctgttccatttttccccttgctttatagaataacgatataagatttccttagccacgtacgaaatcagagccgcaaacaatgcgctgtattggggaacgcttggccctttaacaaaggacagaatcgcttctatgaggatataaacggatacgatcactaagataattcctacaatcgcctcactaatgacttcagcttttccgtgaccaaaaggatggtcttgatcgggcggtttattggaaattccgatcactgccaagactgcaatcgaagcaacgacatctgccgcggaatgtattccgtctgcaaacacggcttcactatcgcctaccagcccaaaaaagacctttcctgccattaagatcagattggcgatcaatgcaatcaaagcaacttttctgcttatttgttctctttcacttgccattttttcctcctataaaactgcacaaaaaaataggagtgctctatatacgctctccgtatcctttcctgtgtaatcactttgtttatcataccaattcaatttcgagtgggtctatagcaacgttgtttcctgtttactaataaataaggtgacagaaaaaaagttggagctatgctaaaaaggtcatacagcaaacaaatgagttcttatgtaacaacagtgatgattcgctattaaaatgctgccgtcagtgaaaaatttccacctaattttcaaaaacctattgacatgagaagatctgtattttactattatctcatattcaagatattttaatttgagatatttggtcggaaagatcagcgatcaagcgcatctctaagtgttcaatccgttgtcatttcttttacacaatattcaatatggattttttataataaaatatctcgaattcgagataaaagggagtgtatcgtaatggctgaatttatacagttagtcaatgaaagacgatctgcaagcaattttctttcaggtcatccaatcacaaaagaagacctcaatgagatgtttgatttggttgcattggcgccatcggcttttaatttgcagcatacaaaatatgtggcggttcttgaccaggacgtaaaggaaaagctgaagcaggccgcaaatggacaatataaagtggttagctcttctgcggttctcttggtattaggggataagcaggcatatcaacaagcggctgatatctatgaaggtttaaaggtattggggatattaaataagcaagagtatgaccacatggtgcaagacaccgtttcgttttatgaaaacaggggagaacaatttaagagagatgaggcgataaggaatgcttcactttctgcgatgatgtttatgctgagtgctaaggaaaaaggctgggatacctgcccgatgatcggctttgatgcggaagccgtaaaacggattttgaacatagacgaccaatttgaggttgtcatgatgattacgattggaaaagaaaaaacagagagcagaagaccgcgcggctaccggaagcctgtgaatgagtttgttgagtatatgtaaaaggagcggataaaaatggctaaaaaaacgatgggaattcatcatattacagcgattgtcggtcaccctcaagagaacacagatttctacgcaggagtgcttgggcttcgtttggtcaagcaaactgtcaattttgatgacccaggtacgtatcatctttattttgggaatgaaggcgggaagccgggaacaatcattaccttctttccgtgggccggagcccgccaaggcgtcattggagacggtcaagttggcgtgacttcgtatgtcgtgccgaaaggggctatggcgttttgggaaaagagactagaaaagttcaacgttccctacaccaaaatcgagcgctttggggaaaaatatgtagaatttgatgatcctcatggactgcacttagaaatcgtggaaagagaagaaggagaggctaatacgtggactttcggagatgtaacgcccgatgttgccattaaaggttttgggggtgcaaccctattatcagcgcagcctgacaaaaccgctgaccttttagaaaacatcatggggctggagcgagtcggcaaagaaggagacttcgttcgttatcgttccgccggtgatatcggaaatgtgattgaccttaagttaacgcctattggccgcgggcaaatgggggccggaacggtgcatcacatcgcttggcgggctaacgatgatgaagatcagttagattggcaaagatatattgcttcgcacggatatggtgtaactcctgttcgggatagaaactactttaatgccatttacttcagggaacacggggaaatcctgtttgaaatcgcaactgatcccccaggctttgcacatgatgaaacacaggaaacaatgggcgaaaaactgatgctgcctgtgcaatatgaaccgcatcgcacacaaattgaacaagggctgctgccgtttgaagtaagagagttagattgatttgacacataaaaaataaagaaacatatattcaattgatgattgctggataccgtcagcaaagaattagataaaatcaaagatgaggagagatacaaatggaagatgcaggactgttgcttattcgtataatgattggtgtggtgtttttgttttatggcacacaaaaattattcggctggtttggcggatacgggattaaaggaaccggacaatggttcgaatcaattggggtgaaaccaggaaacgttgcggccgctctatcaggtcttggggagttagtaagcggaattctatttattttaggcgtattcctcccgcttggagctgctatcataacgatcatcatgttaggtgctatcgtaaaagtccatggagcgaaaggttttgcgaatggcgccggaggttttgaatataacctggtgctcattgcagtttccataggggttgcactcatcggttcaggagcttacgctttgcatttttaatacgaaagtatgtaagaacagttgcagcttgtcggtaactgttcttttattttgacattttcggcaagcttgcaggtactctgcaaagcaaaaaagcggatataataaatataaatctgtatagtgaatgatacgtattgatgagcttggtcatgaaaaacagacctatttgaaggagtaaatggatgaaagagatgacagaattacattcattagtttttatagaaaactttatcaaacagcacaaattcagttttatttatatatcaaggcctggctgttcagtatgtcacgcagttctgccccagctcagaatagtattggatcagtttccaaacatcaaattggggcatatcaatgctgacgatgtagcagaggtcgccggcagattttcagttttcaccgttcctgtgcttcttttgttcattgatgggactgagtttctaagagaagcccgttttgttcattttgaacagcttgaacaaaagctgaaaagggtttatcgattatatgaaggcgaataaagaaataaggcaaaaaaaagaactcaaatgagttctttttttttgcatcaatttattcttcactaggcgaagaagggttatcaacctgcccttgatcacttgtatcattatcacaacttgctgaaataataattgaatgagaaggagagtaatctcctaatgtgaaattgacaccgtaatttttgctgttcgcagtatggctgttttgcaagttatgtccgatatctgtattggcgttttgtgtcattccatttatcgtgagatttgagatgttgatttgagatcgcatgcttcaaaaactcctttcactcagaagtagccgtcatagaggacgctggcagtctatttacttctatgatattgcgtttttatatcattgcatcaacataatggtaaaaataatagcgagtgaatgagtctcttttgaagatgatcaacctatcagcagaaataaagccgcctgataaagaggcggcagatcgttatatgtcatctatgaatttgatgtatcgtttttcgtttgcctaaaggatagaatggtcgtttttaatgatgagtaggagcctatagcagcgtagccataaaaccagcccataaatacgccagaaaagaggctgtgtcgatggcttatgaaaacagaaatgacaaggcctgttattaaggcaactgacggtacaaaagttttggggattttcaataatattttgaggatttgggttatcaatatgatgattggaacagctatcacagcatcccaaaagttcgtgtgaataattggaaaagccatacggcacctcatgaagtgtttatttcttaatttttacgctaaaagcttggaaagcagctcttggatcgcatatgttacattttgggcttgattggcggagcttgtttggcttaaagtattggattcaaaaaccaaacctgtattactcccaccggaaccctctgttgttttagacacagagaacgggctgatggaaactgcaaatccgttattaaaaacgctgttcccggatatcgaatgaatataaactgggaatttcatcattcatctctcctctctgttatgactgtttatacaatatggtgtgtgagcagcagttgcttaaacaaaacggcaaaaactttcagtaagagacaaaaacctgcaaaatgccacaagcgccttttgttaatgcagctttttagggacgttttttttattttttttaccaacttcatcaaaaatattctgattgccagactgggcttgtccatccttatttatgaaatcggggtgaatgagttttttcagatccctgactgttaaaggcttggcgtcatcagttaattctattcctaattgcccgtttgcctctaatgtcgcaattttgacatcttgtatagccgtaacgccgtgaagccttagctgcatttcaagctggtcagctgtaagtctcatcttctttaagttttcgatatgaagctgtccgttttcaatgacgatttttgcttttccggttaacatcttttcaatggtgttcgatttcatttggatccattccataacgatgagtgtgcttgtgaaaattgccgctgcaattaatgttttgaagaggctgtactcgatgattggctgaacgataatagttccgatcgaaatcatgacaaccgtttgagttgacgtcatttgtgcgattgatttccttcctgaaattctcagcaaaatgaccccggctacaatgagaacaagagattcccaagtgaaattcatgctaccacctgaccaatgatgaattagatttgtcatgggattggcttttcttccggccaatcgcaatttaatatatccgaaaggcagtcggttcattctgtcctgaaccgaacaatatttttggtatagatggatatattaagccaaacaatgatagcaacaggagttttttggccgaaacaatctgggaagcggggagcgccataacatgattgaacttgaagttgtcattagaacggttgccagctttggcttgctgttaatcgcagaacgaattttaggcaaacagacaatctctcaaatgacgatttttgattttattgcggcgatcacactaggggctattgctgccggattagcttacaatacttcaataaaatcgcacaatatggccatttcgtttagtatttttgtgctaaccatttttctaatttcgtttctgtcgataaagaacaggaagctgaggaaattttttgccggagatccaacagtgctgattcaaaacgggaagatacttgaatcaaatatgaggaaaatgcgttacacacttgattatttaaatcagcaattacgggaaaaagaaatatttaatatcgaagaagttctttttgccattcttgaaacgaatggtcagctgactgtgttaagaaaaccgcaattccggcatgtgaccaaacaggatttaatgattgcggtaaaccaagaacaaaggcttccgatagaacttattatggacggagaaatcattgagaataatttaaagcagaatcgtttgacggaatcctggcttttggaagaattgcgaaaaagagacataaaggtgaaagagaccgtgtacgcagtgctgctgggtaatggggatatttatgtggatcaatataaagaccatatatcagtccctatggataaggaatgaaggaacaatcaatcttaaagctccttattgaacgcaatggtttcaacttgtcttgggtacgaaatatgcagaagcccgtttaacagctgaatctgtaacaaatgagtttcagcggcttcgggaagctgaatgattcgctcaatttctccgtaataccgttcacgcagcacttccatttcggctggaaaaacaggcgtgatcgttcctttgatcagcagctgggttttagacagtaaacggatcgttaattcttcctcatacacaccgggcatttccacaatgataaaattatattcctcatcttgataaaagtcgtaaacaaacgtagaagcttcggaatcaaaaaaatgttccggggctttatatttgagcacatttgtccaaaagtcactttgtttatattcattcgtaatctcaagccactttcgaattttttcgaaatccatatgagattctccttaaatttgatttgaaatcggcgcagaagggtttccgatttggtcttggtcactaacgtctgaatcaatatttccagtgttcaaaagtgaagacgtaggcgaaagatcccctaaggaaaagtttgctccaaaatatttgctgttcgcagtatggctgttgtgcacagtcggaccgacatctatatttccgttttgcgtgacgccgttgatcttaatatttgcgatattaatttgatatggcatagacgaaacccctttaatctaaaattggcggtggtgcaatcggaggagcattaacgttggatgtatcagagttgccgatagatgtctggtcatttacatcaggatcgtttaagaagttttccattacggattctgtaggtgatgtatcaccgaaagaagagttggtcccttgagatttttgattgttggtagggctgttataagcagcttcgcctattgtaattgaaccattgcccgaaatactgttgatcttcaaataatataggttgattactgtagacggcatcccatcacacccttccatctttctgtacagtacattatgcgccgctgcacccaattgttccttgcatttacgggcaaaactctatctggccctggagtgatgctcgttagaaaaaaagaataaagtttgtcacagcctgaatgtcaatctatttggcaaatacttatcagtgaatgaaaagccattgatataggaagcaatgaattgattcagttattcgaaatgcatgagaccctttaataaagaaagctggcaaacaggatcagtttgaaattattgacaatgaagcaaatgccatgaaataatactcgtgagtaacattacttgcgagtattatttttgggggtggtcctcgttgaaaagtaaaaaaggacgtaaaggggaagaaagccggaaacggttactcaaagctgccgctaatgaattttcgattcggggattccatgacgcgaaggtaagtgaaattgtgaaaaaagctgggttcacgcagccttcattttacctgtactttcaaagcaaagaagccatctttgccgagttaataaccgattttcactctcgggtcaaaaagctgacagagtcacttcttctggaaaacggattaaacacggaggatgtgtcaaaacgggtactgctagctgtagagactgtttttcagtttttggctgaggacaaggatttaaccaagatcggcttttttctcaacccggaagcaaaacaaatgaaaaaagacttggcgatggttttgaaagagaacttagaagcagaacagcggcttggctattttcactctgaactggatatggaaactgtcgctgagtgtttggtcggcatgattgaacatttaaccgattcatttttgttaaccggaatcaaagatccggcaagcctcgcagcagaggttgtgaatcttttgatatacgggatgcttccgaaagggaatgacgtaagatgatatctattattctgaaagtcagtttggcagtttttatgcttgcgggaggcatcataaaggtaagccgcgttccctttcaagttgagcattggcggcattatcaatatccattatggtttctgactgttactggcattcttgaaatagccggggcacttgctatgacagcgggaatttggaatcggtatgcagcgattggagcaggtgttctgtttgtcgttctcatggcgggagccattcatgcgcatatgtttcgagcaagacaatcggtcatcatggcgataccagcgatgatttgtttgattgtttctatcatgatcatcatggggagttacacgtaagcttttcactaatgtttaagaacaagcccatttgcaggaaacctcctgttcttatcgaataatagaaagtccaggaattaactgaagcagtaaaatagagatccatttctgcgttattcgtccggcatcagctgggctttttttataaaggaggaatacaggatggcattaactttggaagacatgactgaggaagagttcgaagcctttcgcgggatgtccgtgcaaaattttgcgaaacaaaacataacttcaggaacttggacggaaaaagaggcatttgagaaatcggagcagacatatgagaacatgattccgaatgggcgagacagcaacaatcattatttttggaacatcacaaatgaccaaggggaaagaatgggctggctctggctgtacgctgatccgtttcatccgcaaaaggaagcgtttatctattcctttggattgtatgaagcctttcgcggaaaaggacttgctcaattggcgcttcaaacgcttgatgaaagagcaagagagcttggtgcggaaaggctggctctacatgtatttgcacacaacgagacagccgtctatctttatcagaagatgggctatgccttgaccaatatacgtatgcggaaacagctatgctgaaaagtcgcttacgttacccaaacacaagatgcctatctggaagcagtggcagggtactataagtcatcattagaaacattaaggtcatgggaaggcttgaacatataaagaaaaaaggacaacagctgttgtccttttcaatgccgcttgaactttctccctcagtcttttttgtcttgatgatccagctcttttattcgtttcgtaagctcattgaaagcctgatcaagctccttataccctttatcatttggcgtcataaaactgagctttcccagcacttcttgtctttctgtctcaagctttaaccgaagctcctcccgctcatttctttctgaaggagcgtcgtttaactgcttttcgatgccgttgtttgagatgacgagtttactgtttgttgttttttcgagaaagtatcggtcatgtgaaaccgccagcaatgtgccgctgtattgtgacagtgtttcttccagctgttcgcgtgacggcaggtcgagatggtttgtcggctcatctaaaatcagcacgtctttttcctccagaatatatgccatcagcttgatctttacacgctcacccatactcatatgcttgatcggttcagtccattggtcggctgtaaaacctaagtgcctcatcagattttgaacgtgcccccttgctttgaatgtttcattctcaaataactcttccggtgtttgttctaaaggcaaatcaaacacctcctgcgttaaatagccgatgtttgcggacggcgacacccatacgcttccttctgctgtttcctgtccaagaatgatattcagcaatgtcgtttttccgctgccattggggcctatgatcgcaaccttttcgccgtgctgaattgtaaagtttgcgtttttaaagagagtcctttctccaaacgcttttgttacattctgaacttctaaaaaccgtttccctgttttgtgggttgtatcgattgaaaagcggactgtatattctggggtaacgggttccgcctttgctttttcaagctctttttcaagccgcttctgcttggattttatctgggcatccgtacgcttcgcttttacccggtgatattctttaaacccttcctttttcgtcgattgagcatgggctttttccgaccaagaagcgagctcattcatttgtgcttcaatccgttcaaccattttttgctgcttttcatattcacgctgctgggtgagtcttttcttctcccggaacttcatatacccggagtaattccctttgaattcaatcagcgtctgatcctcaagcgaccatatttttgttgcggcttcgtctaaaaaatatcgatcgtgagaaacgagaatcacagtgccgttataatgtttcagctgttggatgagaaattgcaagcttttttcatcaaggtggtttgtcggttcatctaacagcagcagatctgcatcctctgatagtcctttcgccagccgcgcttttagtttttcaccgccgcttaactgatgaaaatcacgaagaggcacatgccatttctccagtaacttcttttcggcaggtgtctgatccgcaaaggaatatgccgctgtttcctgttcaaccaaagccagttttatatcctttcgaaggatttgaccctgggaaggggctaagtcattgtgaatgaggtgcagcagcgtagatttcccagcgccgtttttgccgataatcccaatgatatctccttgctgaacactggcatttatatttttaaaaacagtcagatccttcacttcatagctaacgtttgttaatgttacgatctctttcatccatatccctcgctttaaagggagaataaaaaaatcctcccaaatgtgttggaaggattagccgtgcctgtgcatgatcaaataagctattttttataaatagcaggtcgtatatatagaaaatgggcagactaatcctattttttgatttgaaatattgatttcaaacgataaaaataagattagttaatcattgtccacccatcatcccttcttgttttgattacaaacactatagcataccttcaaattcaaaagcaaaggtcattttcatcaaaaaaactcctgctctcatttttgaggcaggagtttcgagtgttattgatgcttcgcttttctcactttataaatcacaatcagcaaaataaaccaaaccggtgtgacaaataaggaaacacgagtatcctgtgccagtgccagcacaaccagaacaaacgccaggaacgcaagaatcaggtaatttgtaaacggataaagcggaagcttaaacttgtttgttttcgctaattcaggtcttgttttgcggtatttcatatggcagatgaccgtaattccccaaatgtagataaagcatacggttgaaatacttgtgatcagggtgaatacgccttctggcatgatgtagtttaacgtaacaccgattaaaatcacgatagctgaaaagaataaagcatttcttggcactttacgctgagtcagtttcgccattgactcaggcgcattgtgatctttcgccagggaatagaccatacggcttgtactgaatacagcgctgttgcatgctgaagcagcggaagtcaatacaacaaagttgataatacttgcagccccgacgatgccaaccgcgacaaatacttgtacgaatgggctttcgctgggattgatgacatcccaaggatagatgctcataatcacgagaagagccccgatataaaaaagcaacacacggacaggaatattgttgatcgccttagggattactttttcaggattttctgtttcaccggctgtaagcccgacaagctcaatgccgacaaaagcaaacacaaccatctggaacgagaggataaacccgtgcatgccattcgggaacaggcctccgtggctccagagatttgtgaagctggacactcctgagcttgtggaaaagcctttgaaaatcatcacaaggccaatgacgattaacgccaaaatggcaatgactttaatcaaagcaaaccaaaattctaattctccaaaaagcttgactgtcgccaggttcataatcagtaaaataattagagcgattaagccaggcacccattgcggcacacccgggagccaatattgagtgtagagcccgactgctgtcagatcagccatcgcaatggaaatccagcagaaccaatatgtccagccggtgataaatgctgccatatcgcctaggtagtcttgtacaaaatccacaaaagagtgatagttcaagtttgataacagcagttcacccagcgatctcataattaaaaagcaaatgatccctgtgatcatataagcaaataaaatcgaaggtccggcaaaatgaatcgatttgcccgagccgagaaataagcctgtcccaatggctccgccgatggcgatgagctggatatgcctgtttttcaagcctctctgcaacgtttgctgatttatattgtctttcgtcatgtcgtctgtcactttatgtgttcctccattgaaaattgtttattgagtcagcaatctatttttaatgattattataacactaaaatttctatcttttttactaaaaaaggattgatgaaaagaattttaatgtgatttggactatttcccgaaaaaagcggctccatttagggagccgcttttttatgctttttcagtttttgtcataaacaggtagagcccgtaatctgtcggtgcggatgcgtagcctgcctgccgcagcattgctgtgatattgccacggtggtatgtcccgtggttgacaacgtggggaagcagttcggaaacagttgttttcatgattccgcttgagggattctgaatctggagtggcttattgagctgttctttttgctgtaaaaatagtatatagcgctcggataacctcagaaaaaggtcttccatttcctctatttctttagcctctgtctgttctttaagctgttcagctaaagccaacgcatcgctcaaggttttgccggaaaacacttcaatccagccgagatcagaaagataaacatgagacaatacatgggatattgacggaaacacgctttgaatttcttgatggtatacctcttttggaagctcttttaatcggttgaatatttgttgattggcccagacgttatattcatacaatttgaatgcaaaatctgacatgttaaaattccccctttcgtgtgtatagcttccattatacacgaacatgagttcttatgtagagtgctcaaaaataaaatttgttgacatatatagtttagaggaataaactaattgacattgaacataaagtttagcggggtaaactataatgaggaggggaagatattgaatgaacaaaagctatgtcaggcgataaacctgtttgtggaagtcctgcttgaagggacagaatttgtacatcgtgaaatcaatcaggatgtcttcaagcatatctcaagggaacaggcagacctgttgaaaattttaaaagtcaagggcccaacctctcccggcagcctggccatgtaccaaaatgtacataagagcgcgatctctaacagactgaaaaagctgctcgaaaagggattggttcaatgggacgactgtctggaaaaaagtgataggcgctctaagcttattaacattacacccagtggtgaacacatactagaagaattagattctgccatctttaacgcgctcaaaccgctgattgatgatatagatgaggaacacttacattccatcatcgagatattcaccattttaaaaagcaaatttaaaggaggagattctgccgaatgagagcaatcatcaaattcaagtgggcaattgcagccatagtattagcacttaccgtcgttttgagtttgttttctccgaacttaacggagctggccaatcaaaaggggcaggcccagcttcccgctgatgctgtttcagaaagggcaaacgccattttaaaacaagcgggagaagacaataattcgatcagtgttgtctttacattagacaacgctataaagaaagaaacagagaatcagctccggataatgattgataaaatcaaaaagatcgacggtgtagaagaggtaacatctcctctgtcagcggaaaaagaagtcaaagaccagttgatgtcgaaagacaagaaaaccgttctcatgcctatcacgattacaggttctgataaaaaggcggaaaaaattgcggacgagatttatcaaatcgttcctgatgacttgacggcatatattacgggagcttcccttatcaaccaggatttcgctcacagctcagaggaagggcttaagaaaacggaagtgatcacagtctgcctgatcatcggtttactgttgatcgtgttccgatctgttgtgacgccttttatcccgattgtggttgtcggtttttcttatctgatcagtcaatccatactgggcatccttgtatacaatgttgattttcctatctcgacgtttacgcaaaccttcttagtcgcgatcttgttcggcattggaacagattactgcatactgcttcttacacgattccgtgaagaattggcaaacgggcatgataaaaaagaagcggcgcttatcgcttaccgtacagggggaaaaaccttatttatcagcggttttgcggtattgatcggattttccgccttaggatttgcgaagtttgcgattttccaatccgcagtaggggtagcagtcggtgtgggaattttaatgattatcctctacacactgctgccattatttatggtgacgctgggtgaaaaattattctggccttctaagaaagtgctgtcacacagtgataacaaactatgggcgtttctcggcagacactccgttgcgcgtccgtttctgttcattgtcatcacggtggtgattacgcttccgttcatcttgacctatgatgaccagatttcattcgactcaactgcggaaatcagcagcgattataaatctataaaagctctcgaggccattaaggatggattcggggaaggaaaagcgttcccgatcaatgttgtcgtaaaaggagacaaagatcttacaacagctgatacaatcccctatctaggaaatatcagcaaagcgatcgagaaagttgatcatgttgactctgtgatgaccattacgcagccgactggtaaaaaaatcaaagatttatatattgataaccagctaggatcggtttcagacgggctggataagacggtaaaagggattgccgatgtccaaagcggattaacggatatagaaaacggactgaatcaaatggcagggcaaaccggctcggcctcaaatggagggtctggcggttcactgggcgatgcggcagatggcttgggcaaaatcaatcagcagctgcagctcgtgagcaaacagatttcccaaaccggcaataccgcacagaccgtgcagcagcttacggcaatcagcggacagcttggccagattcaaaccggtcttgaacaagcgaaccagcagctctcaggccagcaggcacaagccggaacgctgacagaaagcctgaagaagctgtccgaaggcgtgaaaagagcaaatcagggcctgacgaaagtctctgacggtattacagcttccagtgatatgttagaggatatgagcaaaagttcaactgtaagagatacaggcatattcattcctggtcaagtaatgaaggacaaagactttaagaagtcaattgaccagtattcctttgcagacggcaaaggtgttcaattaagtgtcgttctggattcaaatccgtactcagaacaagctattacgacaataaaccaaatcaaaaaagctgtcgcaaacgaagttgacggcactcctttggaggatgcacagatcgtatacggcggggtcacgagtatgaatgcggacttaaaggagctgtccacaacggacttctccagaacaatggtgattatgattataggcctgtttatcgtgttaaccattttgttccgctcaatgatcatgccgatttatatgatcgcgtcattgctgctgacgtactatacgtcgatatccataacagaattaatttttgtaaacggcttaggaaacgcgggtgtcagctgggcagtgccattcttcagctttgtcatcttgatcgcgttaggggtagattattcgatcttcttgctggatcgatttaaggaagaggtgcaccttggcattgagcaaggtgtcgtcaggtcaatgagcaaaatgggatctgtcattattacagctgccattatattggccggtacgttcgcggcgatgatgccttcaggtgttaatacactgatgcaggtggcaagtgttatcatcatcgggctcttgctttacggccttgtcattcttccgcttttcatcccggcaatcattgcgacctttggagaaggaaactggtggccgttcggcaggaagaaaggaaaagagtaatcgagagaagagtgatgaatggtcatcactcttttttcatgatctaaacgacgaacttcagacgtgttacccaaaaaaggtcagacgatcaaacggcggctgggtacttaaaaacaaagagcccggaaaacattcccgggctctttgttttatttccattctgcaattgtatcaatcggcagacggtaggaagcatagccttcgtctgctgcttttccgatagaaagtagcataaccggtacataacgttctttatctaatccgaaggtttccgcgatgttttctttatcgtatccgccgatcgggtttgtatcgtagccatgcgcgcgtgcagtcagcatcagctgcatggaaacaagacctccatcaatcaggatcgtttcacggttgacctgtgccggaagcttttcaaaatgtgcggtcagcgcggcgatttgtctgtctttgacctcctgcggcatgtaaccaagttccacggcttttgaatagatttcttctaagtagtctgcattgttcatgtctgcaaatacagcgatgacagcagatgatgttgtgacctgtgtttggttaaagcttgcaagcggtgcgagcttttcttttccttccgggctgtcaatgacaagaaaacgccatggctgcgcgttaacagaagatggggcagttgttgcttcctctaagatctctgtcatttcttctttgctgatttttactgccggatcatagttgcggatagaacggcggcctttcataatttccataaaatcgtttgttttgatcatgttgatacactcctcttaagcttcgatattatttatattgtttcgcatgcgcgccagcacatcaatgagcaggcggcgttcttctgcgcttacatttgcgagcatttccttcatgaaacgctccttttccttcttagaagactcaattcgctctcttccttggtctgttaaccgaacaagggtgatgcggttgtcctcaggcttgcgccgccttgataccatgcctttggcttccagctgtttcaggtgtctggtaacggctgcgctatcgatatttactttcttttgaaggtcgctttgactgatctcatctgcatgataaagcaatgtcagcaattccaaacgagattggctgatgcccgtgcatgcctcgaacttcacgccaatcaccttgttcacgccttgcagctgatataaaatctcggcttcctctgaacaaaatgacgccaaaacccatcccttctttcctgtcaaaactattaattgatatatcaatgattgacacgtcaattaatatacaacgattgatttcatcttgcaagccatttgcacttttgaacaacctcccagcgcataaaattcgctaggctagaacttagcaaaaaaagctggccgcttcttcagatgatgctggtcacgatgattccctgcatcattcccatttataggtgttcggaatatcactttgccgagcccgtgctcaagcggctttcacaggctgaaagttatgatacaatatacaaatgtttcacagcttcaatccatagttggagctgacatccattatataagggactaggttgaagggaaggtttgataacatgctgcacaatccaactggaaaagaacgcttggcactagcgtttctgctcggcatgcttgctatattgggcccgcttaatatagatatgtatttgccaagttttcctgaaatcgcgaaagatttatcagcaagtgcttcacttgttcagttaagtttaacagcctgtctggtcgggcttacgatcggccagctgattgtcgggccggtcagcgatgcgcagggaagacgaaaaccgctattaatctgtatttttttatttgcgttatcttctctgttttgtgcactgtcgcccaatataacaactttagtggctgcgcgttttttacaaggcttcactgcttctgcagggcttgtgctgtctcgcgcaatcgtccgcgatgtgtttaccggaagagagctttctaaatttttctcgctgttaatggtcattaccgcggtggcgccaatggttgcgcctatgacaggcggtgccattttgcttttgccgttcgcaacgtggcatacaatttttcacgtcttaatgatcatcggatttttactagttcttctgattgcattgaggttaaaagaaacgcttccgctggaaaaacggattccaagctcaatcggaacatccgtcaaaacgatgggcagcctgctgaaggatcgatcctttatggggtacgcgttaactgtcggatttattcacgggggaagctttgcatatgtgtctggtacgccttttgtataccaggatatctacggggtgtctccgcaggtatttagtattctttttggcattaacgggttggcgattatatcgggcagctttatcatcggacgctttggcggaatcattcatgaaaaaagcctgcttcgtatagcggtcattacggctatgattgcgacggctgtgctattaaccatgaccatgattcacggtcctcttgctacattagtcatatccattttcatttacatgattacgatcggcatggttctgaccagcacgtttaccctagccatggaaaagcaggggcaccgcgccggaagtgcaagtgcgctgcttggaatgcttccgctgctcctcggttcaatcgtgtcaccgcttgtaggcattaatgagacaacagccgttccgatgggagccatcatgtttgtgacagctgtcatcggctcactggcgttttttggattaacgaaagaacgagtagggcagaattcataaaaaaacctgacatgacgtcaggttttttgttttatttagaataacaacagcaggcctgcaatcgccggagtcaaaaagatggctgatttcaaaaccacctttggcatgaggttggtgaatttcgcgcctacataggccccgcacattgtcccgaccagaactttgacaagtaaaacgtaatcaacaaaaccttctgtaatatatccgatgcctccacctacagccagagggatgatcacaagcatcgtcgttccgacagaatggcgaatggacagattcagcataatcattaaaccgatttgaataaaaggtgccgacccgatgccgaatgtgccggaaagaacgccggctgcaattcctaagatgaccgctctcgtatacgttgaaagagtgctttgattcacttgagccttctcttttaaaataaataatctgattaaaatgagaattgctgataaaaataacattccagccgtcaaataatgaagcaaatcagccggaataaaagaagtcagcttggcgccgaaaaatgagccaaccgcagcaaagcctccgactattaagccgattttcatttgaatgttaccctcgcgatagtggctgtatgcccctgataagcttgtaaaagccatgccggcaagcgaagtgcctaaagccgtatgaatcgggatatggaaaagaagcgttaaaagggcaatgacaaagccggctccaccggcgccaataaagcctaaaataattcctagaagaaacataacaagaataatgagcatattttttcctccattgaaaagatgtaaaaaatgtaatcgtgcgctattctggcggaggtatggtgtcctattgacgaagaaaaacacgccgttttttcagttgccagtagtccgtcgaccgtcgttcagcaaacatatcgtacctcaaattctgggatctgacaaggcagtttgttgcttcccattaccatctgttatatgattttgatgaagaaaagcccttgaatatattcaaaagaggtattatatatggacgattttaaattagataagccgactccctactacctgcaattttataaccagctaaaaaaaatgatcttcaacgggacttttaagcctggggaacggataaacgaaacacagctggcgaaaagctttggcgtcagccgctctccgataagggaagccatgcgattgcttgagaaagatggtttgttaaaagcggatgaccgaaatgggttttcgatcacgtcgttaacggcaaaagatgtagatgagatttataaaatcagaattccgctggagcagctggcagtcgaattagtcatagacgaagcggacgaagaagagctgaccatactcgaaaaacagcttgaagaaacagagaaagccattcacaacggcacggaagatacggaaatcattcgtttaaaccaaaaatttcatgagctgctggttgatttcagccataacagacatttgaaaaatttgcttgagcatgtaaatgacctgattcatttttgcagaatccttaattataccggcgaccaccgtgcagaaacgatactgcgtgagcaccgcaggatatttgaagaagtgaaaaagaaaaacaaagaagcagccaaacagcatgtgctggctcatttcaatcatgactgtgagcatttgaagcatgtgcttgaagaaggtaaagagaattgatttgtatgatccggtaccaagggagagcagaacccttggtatttttttatgtattcaccacatatctaagaggccccgttaataagattttatgatggtttgactaacgaataatgggggttaaacatgtttatccatatcgtcgggcctggtgattctttgttttcgataggcagaagatacggtgcttctgttgatcaaatacggggtgtgaatggtttagatgaaacgaatatcgtgccggggcaggctctgcttatccctctttatgtatatacagtccagccgagagatacgcttaccgccattgcagctaaagcgtttgtgccattagagcgactgcgagcggccaatccgggcatcagcccaaatgctttacaagcgggagcaaaaataacgattccttcgatctcaaattacattgcggggacattgagtttttatgtgctccggaatcctgacctcgatcgggagctgatcaatgattatgcgccatactcgtcttcgatttcgattttcgaataccatattgcatcgaacggcgacattgcaaaccaattgaatgatgcggctgctattgagacaacttggcaaagacgggtcacgccgctggcaacaataacgaaccttacatcaggaggcttcagtacggagattgttcaccaagtgctaaacaatccgacagcgagaaccaatctggtcaacaacatttatgacttagtttccacaaggggatatggcggtgtcacaatcgattttgagcaggtgagcgccgcggatcgcgatcttttcactgggtttttacgccagctgagagatcgccttcaggcgggagggtatgtgctgacgatagctgttccggcaaaaacaagcgataatattccctggctgagaggctacgattacggggggataggagcggttgtcaattatatgtttatcatggcttatgattggcatcatgccggaagtgagccgggtccagtagcgccgattactgaaataaggagaaccattgagtttacgattgcgcaggtgccgagcagaaaaatcattatcggagtcccgctctacgggtacgactggatcatcccgtaccagccgggcacagttgcttcagcgatttcaaatcaaaacgcaatcgaaagagcgatgaggtaccaagctccgatacaatattcagccgaatatcaatcaccgtttttccggtacagtgatcagcaggggcggacgcatgaggtatggtttgaggatgtcagaagcatgagccggaagatgcagatcgtccgcgaatacagattgcaggctattggcgcttggcagttaacgctgggctttacaccgggcccatggcttctgcggaaattttttacgatcagaaaagtgtaaaaaaagacaccacaactggggtgtcttttttttgattaagtccagagcagcagaatagttcattcatttgtaccttgcataggttgtgttcccattttacgattagtagtagtctgatcaaacaaagagtcagaatacgatttgagagggagttgtctacatgaagacagtattgattttgaattttcctgcggaaggccatgtgaatcctaccttaggcattacaaaagcgttttccgataagggatatgatgtccattatatatccactgaaaaatataaaaaacgattagaagcagcgggagcaacggtccatcttcaccgggatctgctgcgaacaacacctattcatgtcggttcgcccaatggcattcttgatttcgtgaaaatccatatcaaaacgtcattggacattttacagattgtcaaagacttatctaagagcattcaatttgattttgtttattatgataaattcggcgcgggggaattggtaagggattacttagatattccaggagtctcttcatcggcgtctttcttgtttggcgaggagcacctgaaaatcctgccgctgcatccggagtctggagcgccgcttgaattggatcaagagtgtgaagatcttttggcaaaaatgaaagaaacgtacggtgttgccccgaaaaacctggttcaattcatgaacaataaaggggaattgaacgtagtgtatacaagccgttattttcagccagaaagtgatcgtttcggggatgaatgtctgtttatcgggccaagctttccaaagagagcggaaaaaacagatttcccgattgaacagctaaaagatgagagtgtcatttatatttcaatggggactgtactggatcatacagaggatttcttcaacctttgtattgatgcattttcaggctttaacggaaaagtcgtcatcgctgccggagaaaaagcggacctgaccaaattaaagcaggcgccggaaaactttatcattgctccgtatgtccctcagctggaagtgctggagcaatcggatgttttcattacacacggcggaatgaacagcgtaaacgaaggcattcatttcagcgtgccactggttgtcatgcctcatgacaaggatcagccgatggtggcgcagcgtctctctgaactccatgcaggctatgtcatctctaaagatgaagtcaatgcccaaatattaaaacaggccgtagatgaggttttgcgcaaccatcagtatacggcaggcattaaaaaaatcaatcaaagcttcaaggaatgtatggacatggaagaagtgatggagcgggttgatgagttgattcgccaaaaaaacaaataagaaaaagaactcccgtaccttgtacgggagttcttgatttaaaacttgattttgattttttgagcatcactgattttcttatggttatggtcaaagacgtcacttgtcgtgatttcgatccacttgatctcttttgttttcttctcagcatccgcggccttatcatgagcatggcggcttgatgcgttcacaataaagccgagatttccagacttttcggcgccgccttccaattcgccgtttaactcttcaagataaatatctttgttccaatcaaaggtttcgcccgtatttgttttcatcaatgcaatcggcgcaacatttactttttttgaagaggtgttcttgatatcaacgaaaaccttaacgaaatcaaactcttcatcgtgtgttaactcatgaaagtaatcaatcatgctgtagtccgggcgcaagtggatcagcttcatttcttttactgttaactccacgtcgccaatcttataggttttgttcacttgtttgatatcttttaagacagcttttcctttatcatctgaaaacgtttggccgaccttaagcaatgaccggtcatcagttacctgggaattaggctgataattatctgtgctgtccttctgggatgaagtgctttgcggctcagcttttactgttttctccccgcctgcatgctgtttttcagtactggcgtttgatgagcagcccgcaagcatgatagcaaaaacgaaaattgaaagaattcttctcatgatgattcctccattaaaaagagatcccgttacttcatacaagcaacgggacaccttgtaatcttttacttatcgttaatcttaatgttgtattgtaaagccttgaagacatttttggcgatttctgtattgtcgatttggccggcaaatgtctcactagacggaccgtatgcatagacgggaacatcttcaccggtatgtccgcctgttgtccatccagtgtgagagcgtttattaaagatgttctcgattgcgttatcgatatccagtacttccttcgattttgccgcttcttcaacagattgaatttcggcttttgttaaagccaatttcttttgatcgatatatgttttcaaagttttttcaacatccgcgccgtcagagatcttttctgccataaagtcaggtgtgcgctttgcggctttaatgggttcactgaaccagttgtagatgccgtccgcaccgatggaatatccgccggttgagtggtcagccgttgcgacaaccaatgtgtgcttgtcttttttagcgaaatcaatagccgccttataagcttgttcgaagtcttccatctcgctcatggcaccgacgatatcattgtcatggcccgcccagtcaatctggctgccttccaccatgaggaagaatccgtctttatccttgtttaattttttaatggctgtgtttgtcatatctttaagtgatggaatatccttcgtccggtcaatctttttaggcaggccgccgtcagcgaataggccgagaacttggctgtctttatttttcagcatgtccttgcgatcatccacgtagctgtaccccgcttttttgaattccttgatcaaattacggtccttacggtcaaaattgctctttcctccgcctaaaaggacatcaattttgtgcttgccgttgaccatctcatcaaaataatcatccgcaattgagttcatattttttcggctatggtcgtgtgaaccaaaagaggccggagtggcgtgtgtaatttctgaagtggccacaagtcctgttgcttttcctttttccttcgcagcttcaagcaccgttttggcttctgacccgtcgttatcaacggctatggcattattgtatgttttaattcccgcagacatagccgttgccgccgctgcagaatccgttacattttgttcaggatcatcgggataagttgtttgctggccgacaagatactgatcaaaagccgtaggctccacaacttttgtctttttattatcctttaagtatcgataagcggacgtataagacacacccataccatcaccaatcagaacaataacattcttaatttcgtcttggtttccctttttcttttcctgggcgctggcatcaggcacactgccgctggctaagctgctgaacgcaattgatgataaaaccgcgataggcagtaatttcttcgggaattttttcaactggataacctcctaaatatagatgaatctcaatgacaacccaattatatttttaaactgttaagctagtattaatcgattttaaagattggatttacaagaataatgaactgctatcaagagaaaggaaagagtgatagtactatagaaataaattggaggaatagatactggccgtggataggcggactgaaatctgctatagtcgcatagaagcaacccgcttacatctggaacaattttaagtattatgttggaaagaggtattgtgtaagcacatgtctgagcagttcatatggagtggcatcattttattttaggagggaacaacatggacgttttttctgagtatttagcgggaattgatgacccgttccaccgagaaagaacggaagaggtgttaacttggataaaaaataaatatccaaatttacatacagaaataaaatggaaccaaccgatgtttacggatcacggtacatttattattggctttagtgtttctaaaaagcatttagctgtcgctcctgaaaaagtaacgatagcgcacgtagaggatgatattgtgaaggctggatatgattacaccgagcagctgatacgtatcccttggaatggtccagttgattacacgctacttgagaaaatgattgagtttaatattctggacaaggcggaatgctccactttttggcgaaaatgaaggaaaaaggcataacatatgagctgtataaaatatgttacgccttttcatttgtctatttttcgttttgatcatctattgctgcttttcttcaaacaaggtcatttcattgagcgtaagctggctcgcagaataatgattaccttgtttccatttcacttcaatcgtaatatcatggccttcaagctcatgttcatctaaccgctctaaaaaagaaacggacttttcctttgcgcttccatcacgataagtgcctccagcataatcatgcatcgggatttccgtgtcagaactcagcagaatttcatcatccttttttacaatcagtgattccaaataagtgttgtctgtttcatgtggttcaccgatccaataaagttcgccgctgtattcattcggtgcatcttcattttttttgaaaacagcttcccaattctggtctttgctttctccctgccaattcggatactccaaacgaacatgatgaatcaggtgataggaaaaaaagatcaagcagagagcgattaataggaatgccgtgaaaatgagagggtatttataatgactggacataaaagactcctattcgtttaatcaattaccttcgaaaatagaatttcatcccgaatcaaaatgccgttttcagccacctcgggaatctccggcttgagtcggcgcgctttttcaactgcgttcggaaacacttcggcgaattgatagcctctcttttgataaaacgccatcgcatgtacattatcattcgttgtaataagctttattcgttgacaatgtgcatatttagccgtctcttcaacctgctggagtaaagctgtgccgattcctttattttcaatcatactatctaatgaaataatttcacaatctttcccatctatcaagtatgtaatacagccaatgatttcgccgctttcatttactgcggcaaatccatctaattcatcacaccgaaaaatgccgctggaaatcgccatctcgggtgtaccccaatgcttggcaaaaaaatcggtcaacatctgtttcgctatctcattgtttgggatgatcatcatcataacactcctctattgaaagattgcatatgtactatcaatataaacaatatataacaaaaaaaatagatgttgaggtgacggcatggaaatcagcgatgtcatttacgggcaccaccatatagacggagtgctggaagagcttatcaaaagcgctcctgtgcaaagattaaaagggatctatcaaggcggagcaagctttttagtcaatcgaagatggaatgtgaccaggtatgagcactccatcggcgtaatgctcctcatcaaaaagctcggaggaacgatagaagaacagattgcaggtctgctccacgacgtatcacacacagctttttctcatgtggtcgacgttgtctttgaaaatcaagcagaagactatcatgaaaacatctttcaacaagtcattgttcactctgaaatcccggacattttacaaaaacacggctatcatactgaagaacttttatctgacgattcaaggtggacattgctcgaacagcccgcaccggagctgtgtgctgatcggacagactatacgctgcgtgatatgtaccgatatggacacattaacctgcacgaagcgcaaacctttttggatcatcttattgtgagaaacggaaggatgtttcctgatagtattgaagccgccgaatggtttgtcagtgtgtactacaaggaagtaattgatttctttttgaatcctgtgaatgtatatggatatgaatatttagcgcgagcattgaaggcagcgctgcggcatgatgtcatatctgcagaggatctgctgaaaacggaccaagaggtactgaacatcctgcgtgcatcaaaaaatgaagaagtcctgagcttgcttacatccattcatcccggcatacaagtaatagaggatgacatccagtacgatttccatcaaaagaagaaaatgcgcctaatcgatccatccatttttcttgatgacaaatggatcaaatcctcagatgtttctgaaaaggtgaggaaaatgggtgaggccgcttatcaaaaagcaaaaaaaggtgtgtatataaaaatcttaaatcagtaattgccgcctgacagcggctttttttatgtttggctttgcaaacaaaggggaataggacaaactgcgggaacgcattatgagaatatcagcgtatttacataccgttcgggggtatagtattatcgagagggcatgttttcattgtctgcgggcaaaagttacaggaaaaaaatgaagcaaaggagaatgaacatgaaaatctctaaaaatgcactgggaattctgatgttatctcttgtttttgttttatcagcatgcggcaataacaacagtacgaaagaaagcacacatgacaatcattcagactcctcaacacatgaagagatggaccattccggatcagctgacgttccagagggattacaggaatctaaaaatccgaaatacaaagtaggcagccaggtaatcatcaatacttcccatatgaaaggcatgaaaggtgctgaagctacggtaacaggtgcctatgatacaactgcgtatgttgtttcttatactccgactaatgggggacagcgtgtggatcatcacaaatgggtgatccaagaagaaatcaaagatgccggagataaaacgttacaacccggagatcaggtgattttagaggcttctcatatgaaaggcatgaaaggagcaacagccgagatcaactccgcggaaaaaacaactgtatacatggttgactatacatcgacaacaagcggcgaaaaagtgaaaaaccacaaatgggtcacagaagatgagctttcagctaaatcataaaaaatcctccttttacaaggaggatttttttgctgtctgaacaggtcttgttaaagaaatgaaagcaaacaggacagcgatgatcacaattgacccgccgcaccatgctgttgacaccacagtacccgtttgatccaaaacaacaccgccaatggctgagccaagggcaattccgacttggagggccgatgtgttaaagctttgctgaatgtcagacgaatcaggtgcaatttcaattaaatagctttgctgagccggggcgaggctccagctcagaagaccccaaatcaccatcacaggcaaaaagaaaatcatagacgatgtagacagcggcagtaagaacataatgatagcaaaggaaccggtcaccagcaaaatgctcttaaaggaaccaagccggtcagatagcgctcctccgaaagggcctccgcatacggcagatatcccgaaaaggaaataacaaatgctgacccagaaagagctcaggtgaagagtctcttctaaaaacggcgcaaagtaagcgtatagcgtgtagtggccagctaatgtaaacatcgtgacgaggtgtgaactcgcgattttcagattaccgatcgtcttgagctgttcccggaaaggaatcattttctccgccggtattctttcaaagaagattgaaataatcagcatggagatcagcgccaacaggccgatgccaaggaacaaaatccgccacccgaaggaatcgctgattaagattccgagcggcacacctaatgcgatagcagagctgaaacccataaaaataattccgattgcgcgggctctgtattcaggcgctacaattttcggggcaatcgttaaagaaagtacaacaatcagccctgtactcatcgccgccaataccctagataccatcaatgttgcgaaattagggctgaagtaggcgacaagattgctaaggaagaaaacaaataaagcaattagatataagcgcttccgctcaatcttcgcagtcaatgccaaaagcagcggcccagatactgcatatcccagcgcaaacacactgatcagctgtccggctgaaacaatggaaatgtctaaatcatttgcgatctgaggaagaattccccccacaattaactcaaccaatccgactgcaatcgtagaagctgcaagcaggaaaactttgaaattcataacaaactcctttacttaaatgttttgataaataaaaaaaatcctgattacaaaaaatgtcataaacaaattttgtaatcaggattttacggttcctggtagacaccctcaaaccatattattgaggttatacaagtgttaatagctatttaattgattcgtttccgttgatgagtgtaccacattatgaatgaatcttccatagaaaatttacaaagtaatgaaccggacaagtgtatgattatatttattttataaaagtatagacatttaaaagtgaatgactataataatcaatgtaagcgttttaattacaaggggggatagcagttgaaaaaaatattactcgcgtgcagttcaggaatgtctaccagtttattggtgacaaaaatgaaggaatacgcacagtctatcggtgaggaagcagagatttgggctgttggccaagataaggcaaaagaagacatgagaaaagcggatgccgttttgatcggtccgcaaatgagctttctgaaaagcgagctccaaaaagaagcagatcaatacaacattcaagttgaagtcattgacatgatggcctacggaatggcagatgggaaaaaagcgtatgagcaggcattgtccttaatggtgaatcaataatggaacagatgaaaatcacgaatttaacagacgagcaaatcagttttcagctaatcctgcacagcggaaatgcccgaagctgcatcatacaatcactgcgcgcctataaagaagggaacaaggacgaggctgatgccctcattgccaaggcggagcaggatttatccgcggcccatgacattcactttcaaatgatacagaaggaatccggcggagaagcaacagctttttcattgctgcttatgcatgcagaggatcatctgatgtcaacattatccatgaaagaattagtgaaagagatgcttgatctctttaaaaccaagaatatataaaaaataggggtggatagggtgttcgagaaaatcagccaattccttgttccaattgcagggaggttaaacaataaccgctatttgcaagtgttgcgtgatgcatttatgctggctttcccgctgacgatattcgggtccatttttgtcgtgttaacgaatttgccgtttctaaacaaaatcatgaacgcctcaatgcttacgtcgtttcagtctcatttcggcattgcctccacggcgacaatgggcattatgtctgtctttgttgtgttcgggataggctattacctgtcgaaaagctatcaggtcgaagctgtatttggcggagcgatcgctttggtttcctttttgctcttaacgccatttatcattcagccggaaacaggtgatgccattacaggggttatcccggtcgatcgtctcggtgcaaaagggatgtttcttgggatgattacggcatttctttctggcgaaatttacagaagaatcgttcaaaaaaacctgacaatcaaaatgccagccggcgttccgcctgctgtagcaaaatcatttgccgcacttattccggcttttatcacattgaccgtatttttgctgattaacgtaatggtgactctgttttttaaaacaaatatgcacgacgtcatttatcacgcgattcaggctccgcttgtcggacttggaagcggtatcatcccaacgctgattgccgtgtttttcattcaaattctttggtttttcggactgcatggacagatcattatcaactccgtgatggacccgatttggaatacactgcaggtagaaaacctttctgcttacacggcgggaaaagaaatccctcatattatttcaaaaccgtttatggagatttatacagtagggatgggcggaaccgggatgacgcttgcggttgtgtttaccattctcatattcatgaaaagcaggcagatgaagcaagtatcaaaacttggcctcgctcccggtatttttaacgtaaacgaaccgattatcttcgggcttccgattgtcatgaatccgatcattattgtgccttgggtgctggcaccgatggttgttacgctcgtcacctatctggctatgtcagccgggctcgttccgcctccgactggtgtgacggtgccgtggacggttccattattcattaatggcatcatggcgacgaactcaatcatggggggcgtgatgcaacttatcaatctgctgattgtcttcgtgatctggtttccattcctaaaagcaatggataaattaaatctggcaaaagaaaaagaacaggctgtgcaggaaacagctgctcagcaaaatgataacagcataaaaatgtgacataaggggagagagacttggcacaaacagaacaatatcgttttccaaaggatttttggtggggatcatcggcttcagcaacacaaacggagggtgccgccgacagagacggaaaaggccagaatatatgggattattggtttgaaaaagaaccgcatcgtttttttgatcatgtcggacccgcagacacatcccaattttacgacaactataaagaagatatcaggctgatgaaggaacttggccacaactcgttccggatgtcgatttcctggtcgcgtttaataccaaacggaacgggcgagatcaacgataaagccgcaaatttctataacaatgtcattgatgagttgatcgctaacggaattgaaccttttgtcaatttgtttcatttcgatatgccgatggcgcttcaaaaaatcggcggctgggtcaacagagagacggttgacgcgtatgaaaactatgcaagaacttgcttccgtttgtttggcggcagagtgaaaaaatggttcacgcataatgaaccaatcgttcctgtagaaggcggatacctatatgattttcattatccaaacaaggtcgattttaaagaggccgtccaggttggatttcatacgatgctgtcaagtgcccgtgccattcaggcttacagggagatgaagcaggacggaaaaatcggcatcatcttaaatttgaccccttcatacccgagaagcagccatccggcggatgtgaaagccggggaaatcgcagacgcgttttttaacagatcttttttagatccatctgtcaaaggcgaatttcccaaagagctggttgacattttgaagcatgaaggctttatgcctgattacattcctgaagatcttgacatcatcaaaaagaacacggttgacctgttgggagtgaattattaccagccgagacgtgtgaaagcgaaagaacatcttccgaatcccgacgctccttttttgcctgacaggtattttgatccctacgtcatgccgggccgcaaaatgaatccgcatcgcggctgggagatctatgaaaaaggcgtttatgatattttgatcaatttaaaagaaaactacggaaacatcgagtgttttatctctgaaaacggcatgggggttgaaggtgaagagcgcttcagagatgaacaaggcatcattcatgatgattaccggattgaatttataaaagagcacctcaaatggattcaccgcgccatacaggaaggctcgaacgtaaaaggctatcacttatggacgttcatggacaactggtcttggacaaatgcctataaaaaccgctatgggtttgtatcagtcaatcttgagaaagacggagaaagaaccgtcaaaaagagcggaaaatggttcaaaacagttgctgagcatagcggtttctagattttcctaaaggtcaagatcttccggcaatcatcataacgaatagagatgacgaaaatccgcaacattgatgaaatagggaaaagaacttatgatatccgtaaaagcttatgtgatatcagactctaacagctgccggaggatgccaatgaataaatacgaaattattgcaaatgaaatgagaaatagaattaaaaataacgtatatccgatcgatcagcccattcctgatgaagtatctcttgcaaaagaatttaactcaagccgcatgacgatgaagagagccttggataatttagttgctgagggtctgctgttcagaaaacgaggccatggcacgtttattattcaatctgcaatacaggatgaccatgtacatgtagtcagcaatgagattctcggattgaccaacttgctgaaagataaaaaaatccaaagcaaggtcattcagtttgaagtgcaatttcccactgaggaagtggccgcccatttgtctattgatcaaaaaacaccggtttattatgtcgttcggcttcgaattgtagaaggtgaaccctatgtattagaaaaaacatatatgccgactcatttaataccgggcattaatgacgatgtacttcatgattcgatctacaatcatattacaaatgtgctgcagctcaaaatcgccggaacgcatcggaaaatcagagcctgcaaatctgatcatattgaccagcagcatctgggctgtaaacaggatgatccaattctggaagtggaacatgtgggcttcttagataccgggattccatttgaatattccttttcacgtcatcggcatgacaagtttgttgtgacttctgtaaacatacggcgctgattgcggagacaacaaggaggccatctgcatgcttggcggtattgaagcaggcggcacaaagtttgtttgtgctgtcggtagagaagatggaacgatcattgacaggatagaattctccacaaagatgccggatgaaacgatagagaaagtgattcaatattttcgccaattttcattacaggcaatcggcatcggctcctttggtcccgttgataacgataaaaccagtcaaacatacggtactattacggccacgccgaaagcgggctggagacactatccctttttgcaaaccgttaagaacgaaatgaagatcccagtcggatttagtacagatgtcaacgctgcggcgctgggtgaattccttttcggtgaagcgaagggtcttgacagctgcctgtatataacgattggcactggcatcggagcgggggctattgtagaggggaggctccttcaggggctgtcacacccagagatgggccatatttatatccggaggcacccggatgacgtataccaagggaagtgcccttatcatggagattgctttgaaggcttagcttcaggccccgctatcgaagcccgctggggaaaaaaagccgcggatttatcagatatagcccaagtctgggaactggaagggtactatattgcccaagcgctggctcagtatattttgatccttgcacctaaaaaaatcattcttggcggcggcgtcatgcaacagaaacaagtgttttcttatatctatcaatatgtaccaaaaatcatgaacagttacttggatttttctgaattatcagatgatataagtgattatattgtacctccacgtttaggcagtaacgccggaatcatcggcacgctagttttagcgcatcaggccttacaagcagaggtagcatccggggaggtgcgatcatgacgcatcctttatttttagagcctgtctttaaagaaagactatggggagggacgaagcttcgtgacgcttttggctacgcaataccctcacaaaaaacaggtgagtgctgggccgtttctgcacatgcccatggcccgtcggctgtaaaaaatggcccgctggcaggaaaaacactagatcaagtatggcaagatcatccagagatattcgggtttccggatggtaaggtgtttccgctgctggtaaagctgctggacgccaatatggatctctccgtgcaagtccatcctgatgatgattatgcaaaactgcacgaaaatggcgaccttggtaaaacggagtgttggtatatcattgattgcaaagatgacgccgaactaattttgggacatcatgcaagcacaaaggaagagttcaaacaacgaatagaaagcggtgattggaacgggctgctgaggcgaatcaaaatcaagcccggagatttcttttatgtgccaagcggtacactccatgctttatgtgagggaacccttgtccttgaaatccagcaaaattctgatacaacgtatcgcgtatacgattatgaccgctgtaatgaccagggccaaaaaagaactcttcatatagaaaaagccatggaagtcataacgataccgcatatcgataaagtgcatacaccggaagtaaaagaagttggtaacgctgagatcattgtttatgtgcaatcagattatttctcagtgtacaaatggaagattagcggccgagctgcttttccttcatatcaaacctatttgctggggagtgttctgagcggatcaggacgaatcataaataatggtattcagtatgaatgcaatgcaggctcacactttgtcttgcctgcgcattttggcgagttttcaatagaaggaacatgtgaattcatggtatctcatccttaatgaatgggggagttgcatttgtttaagaaacatacgatctctttgctcattatatttttacttgcgtctgctgttttagcaaaaccaattgaagcgcatactgtgtcgcctgtgaatcctaatgcccagcagacaacaaaaacagtgatgaactggcttgcgcacctgccgaaccgaacggaaaacagagtcctttccggagcgttcggaggttacagtcatgacacattttctatggctgaggctgatagaatccgaagcgccaccgggcaatcgcctgctatttatggctgcgattatgccagaggatggcttgaaacagcaaatattgaagattcaatagatgtaagctgcaacagcgatttaatgtcgtattggaaaaatggtggaatccctcaaatcagcttgcacctggcgaatcctgcttttcagtcagggcattttaaaacaccgattacaaacgatcagtataaaaaaatactagattcttcaacagcagaagggaagcggctgaatgccatgctcagcaaaattgctgacggacttcaagagctggagaaccaaggtgtgcctgttttgttcaggccgctgcatgaaatgaacggtgaatggttttggtggggacttacatcatataaccaaaaggataatgaaagaatctctctatataaacagctctacaagaaaatctatcattatatgaccgacacaagaggacttgatcatttgctttgggtttactctcccgacgccaaccgagattttaaaactgatttttacccgggcgcgtcttacgtggatattgtcggattagatgcgtattttcaagatgcctactcgatcaatggatatgatcagctaacagcgcttaataaaccatttgcttttacagaagtcggcccgcaaacagcaaacggcagcttcgattacagcctatttatcaatgcaataaaacaaagatatcctaaaaccatttactttctggcatggaatgatgaatggagcccagctgtaaacaagggggcttcagctttatatcatgacagctggacactcaataagggagaaatatggaatggcgattctttaacgccaatcgttgagtgaatccgtaatgtcacaattaagaaggtgctcaagaagtttcttgagcaccttcccactggattaagcattcatatcgcctaacccaggactgtgttcatttggtatttcaggaagcactggtacgggaaaccctgccggaggatctattacttgtaactctccgccatttcggcttggagatttcccttgatagatttcactgattctcgtttcatccaacctaaagttaaactgtgcattatgatagcctaattcgacatactttctgcactcaggatatttattaatgtcataattcggtacagggagcagcttcgcccattcaacgcccaatgtctcgagcgctttcgcgaatgcattctggtgagcattgtcgcgtacaatcagaaaagcaagtgtttcgcggaacgtctgattagagctcatttcataaattcttgttttttgcagcacacctgtcgactcaagaagcaggttatccagcaggtcagtaattaagtttccgtggttatacacccacgacccgttccacggattgccccctgcatcaacaggaagggaactttgcgctccaataatataatgatgaggattagcatgtttaaccgcttcatcaagtggcgcttgatctgcaccttgactgccgacaccttcaccgcctgattcatctaataaagcattgattgtgttttgaaccagttcaacgtgggcaatctcctctaaaaaaatgccgcgaagcagatcgcggtactgtttctgctttcctctgaaattagagctttggaaaaaaaactgcatcattgtacgcatttctccgtaatgaccgcctaatatctcctgcaggaccttagcagctgccgggtctggcttgtccggtttaatgatattaatcagttcctctttgtagtaatacataacacgcctcatttcttcttaagagattttcttatattatttgtaagatgagataaaatatatacatgataagcatgggaagacgtgaaagaagaaaataaaaaaatacatgaaaagtgttgaccaaatgaaacaagcatggtatattattaaacgtcgctgatgaacagcgtgaaacaaaacgaaaaacaaaaaagtttttctaaggtgtttacaagattttaaaaatgtgtataataagaaaagtcgaattgaaaaagattcgaaaaaacattttaaaaaaacttcttgacttcaccatcaaatgatagtatgatagttaagtcgcttgataagcgcccgtagctcaattggatagagcgtttgactacggatcaaaaggttaggggttcgactcctctcgggcgcgccatttaagataccacgcgggtgtagtttagtggtaaaacctcagccttccaagctgatgtcgtgagttcgattctcatcacccgctccattattgaatgatctttgaaaactaaacaagacaaaacgtacctgttaattcagtttttaaaaaatcgcacagcgatgtgcgtagtcagtcaaactactttatcggagagtttgatcctggctcaggacgaacgctggcggcgtgcctaatacatgcaagtcgagcggacagatgggagcttgctccctgatgttagcggcggacgggtgagtaacacgtgggtaacctgcctgtaagactgggataactccgggaaaccggggctaataccggatggttgtttgaaccgcatggttcaaacataaaaggtggcttcggctaccacttacagatggacccgcggcgcattagctagttggtgaggtaacggctcaccaaggcgacgatgcgtagccgacctgagagggtgatcggccacactgggactgagacacggcccagactcctacgggaggcagcagtagggaatcttccgcaatggacgaaagtctgacggagcaacgccgcgtgagtgatgaaggttttcggatcgtaaagctctgttgttagggaagaacaagtaccgttcgaatagggcggtaccttgacggtacctaaccagaaagccacggctaactacgtgccagcagccgcggtaatacgtaggtggcaagcgttgtccggaattattgggcgtaaagggctcgcaggcggtttcttaagtctgatgtgaaagcccccggctcaaccggggagggtcattggaaactggggaacttgagtgcagaagaggagagtggaattccacgtgtagcggtgaaatgcgtagagatgtggaggaacaccagtggcgaaggcgactctctggtctgtaactgacgctgaggagcgaaagcgtggggagcgaacaggattagataccctggtagtccacgccgtaaacgatgagtgctaagtgttagggggtttccgccccttagtgctgcagctaacgcattaagcactccgcctggggagtacggtcgcaagactgaaactcaaaggaattgacgggggcccgcacaagcggtggagcatgtggtttaattcgaagcaacgcgaagaaccttaccaggtcttgacatcctctgacaatcctagagataggacgtccccttcgggggcagagtgacaggtggtgcatggttgtcgtcagctcgtgtcgtgagatgttgggttaagtcccgcaacgagcgcaacccttgatcttagttgccagcattcagttgggcactctaaggtgactgccggtgacaaaccggaggaaggtggggatgacgtcaaatcatcatgccccttatgacctgggctacacacgtgctacaatggacagaacaaagggcagcgaaaccgcgaggttaagccaatcccacaaatctgttctcagttcggatcgcagtctgcaactcgactgcgtgaagctggaatcgctagtaatcgcggatcagcatgccgcggtgaatacgttcccgggccttgtacacaccgcccgtcacaccacgagagtttgtaacacccgaagtcggtgaggtaaccttttaggagccagccgccgaaggtgggacagatgattggggtgaagtcgtaacaaggtagccgtatcggaaggtgcggctggatcacctcctttctaaggatattatacggaatataagaccttgggtcttataaacagaacgttccctgtcttgtttagttttgaaggatcattccttcgaaacgtgttctttgaaaactagataacagtagacatcacattcaattagtaatacaagatatcacaagtgattctttttaacggttaagttagaaagggcgcacggtggatgccttggcactaggagccgatgaaggacgggacgaacaccgatatgcttcggggagctgtaagcaagctttgatccggagatttccgaatggggaaacccaccactcgtaatggagtggtatccatatctgaattcataggatatgagaaggcagacccggggaactgaaacatctaagtacccggaggaagagaaagcaaatgcgattccctgagtagcggcgagcgaaacgggattagcccaaaccaagaggcttgcctcttggggttgtaggacactctatacggagttacaaaagaacgaggtagatgaagaggtctggaaaggcccgccataggaggtaacagccctgtagtcaaaacttcgttctctcctgagtggatcctgagtacggcggaacacgtgaaattccgtcggaatccgggaggaccatctcccaaggctaaatactccctagtgaccgatagtgaaccagtaccgtgagggaaaggtgaaaagcaccccggaaggggagtgaaagagatcctgaaaccgtgtgcctacaagtagtcagagcccgttaacgggtgatggcgtgccttttgtagaatgaaccggcgagttacgatcccgtgcaaggttaagcagaagatgcggagccgcagcgaaagcgagtctgaatagggcgcatgagtacgtggtcgtagacccgaaaccaggtgatctacccatgtccagggtgaagttcaggtaacactgaatggaggcccgaacccacgcacgttgaaaagtgcggggatgaggtgtgggtaggggtgaaatgccaatcgaacctggagatagctggttctctccgaaatagctttagggctagcctcaaggtaagagtcttggaggtagagcactgattggactaggggcccctaccgggttaccgaattcagtcaaactccgaatgccaatgacttatccttgggagtcagactgcgagtgataagatccgtagtcgaaagggaaacagcccagaccgccagctaaggtcccaaagtatacgttaagtggaaaaggatgtggagttgcttagacaaccaggatgttggcttagaagcagccaccatttaaagagtgcgtaatagctcactggtcgagtgactctgcgccgaaaatgtaccggggctaaacgtatcaccgaagctgcggactgttcttcgaacagtggtaggagagcgttctaagggctgtgaagccagaccggaaggactggtggagcgcttagaagtgagaatgccggtatgagtagcgaaagaggggtgagaatcccctccaccgaatgcctaaggtttcctgaggaaggctcgtccgctcagggttagtcgggacctaagccgaggccgaaaggcgtaggcgatggacaacaggttgatattcctgtaccacctcctcaccatttgagcaatggggggacgcaggaggatagggtaagcgcggtattggatatccgcgtccaagcagttaggctgggaaataggcaaatccgtttcccataaggctgagctgtgatggcgagcgaaatatagtagcgaagttcctgattccacactgccaagaaaagcctctagcgaggtgagaggtgcccgtaccgcaaaccgacacaggtaggcgaggagagaatcctaaggtgatcgagagaactctcgttaaggaactcggcaaaatgaccccgtaacttcgggagaaggggtgctctgttagggtgcaagcccgagagagccgcagtgaataggcccaggcgactgtttagcaaaaacacaggtctctgcgaagccgtaaggcgaagtataggggctgacgcctgcccggtgctggaaggttaagaggagcgcttagcgtaagcgaaggtgcgaattgaagccccagtaaacggcggccgtaactataacggtcctaaggtagcgaaattccttgtcgggtaagttccgacccgcacgaaaggcgcaacgatctgggcactgtctcaacgagagactcggtgaaattatagtacctgtgaagatgcaggttacccgcgacaggacggaaagaccccgtggagctttactgcagcctgatattgaatgttggtacagcttgtacaggataggtaggagccttggaaaccggagcgccagcttcggtggaggcatcggtgggatactaccctggctgtattgaccttctaacccgccgcccttatcgggcggggagacagtgtcaggtgggcagtttgactggggcggtcgcctcctaaaaggtaacggaggcgcccaaaggttccctcagaatggttggaaatcattcgcagagtgtaaaggcacaagggagcttgactgcgagacctacaagtcgagcagggacgaaagtcgggcttagtgatccggtggttccgcatggaagggccatcgctcaacggataaaagctaccccggggataacaggcttatctcccccaagagtccacatcgacggggaggtttggcacctcgatgtcggctcatcgcatcctggggctgtagtcggtcccaagggttgggctgttcgcccattaaagcggtacgcgagctgggttcagaacgtcgtgagacagttcggtccctatccgtcgcgggcgcaggaaatttgagaggagctgtccttagtacgagaggaccgggatggacgcaccgctggtgtaccagttgttctgccaagggcatcgctgggtagctatgtgcggacgggataagtgctgaaagcatctaagcatgaagcccccctcaagatgagatttcccattccgcaaggaagtaagatccctgaaagatgatcaggttgataggtctgaggtggaagtgtggcgacacatggagctgacagatactaatcgatcgaggacttaaccatatttttgaatgatgttacatctgttatctagttttgagagaacactctcaatttgtttggtggcgatagcgaagaggtcacacccgttcccataccgaacacggaagttaagctcttcagcgccgatggtagtcgggggtttccccctgtgagagtaggacgccgccaagcattacttttatcatcgcggggtggagcagttcggtagctcgtcgggctcataacccgaaggtcgcaggttcaaatcctgcccccgcaaccaaatatatgattaaataaggagtgccctaagggtacaactaaaataatcttatacaaatatggtccggtagttcagttggttagaatgcctgcctgtcacgcaggaggtcgcgggttcgagtcccgtccggaccgccattaatgtaaacgaaacgatcatgttttcgttttttttgtgttttcttttactgtatcttctgcttggtgtcatagccaagctttctttatatcgggaacatcttggatattccagcaaaattcgataaactaggaagagcacatataggcataagcagggttgaaaggagattttggttcatggatgaatttgatttgatacatagcattactccgcggaccattcaccattcttccgttgatgtaggaataggtgatgatgcagcgctctacactgcgaaacacggcgttcaggaaattgtttgtgttgatactatggtagaagacgtgcacttcaaattacactattcctcacctgaagatatcgggtataaggcgttagccgttaatataagtgatattgccgcgatgggaggcattccgaaattttatttggtatcacttgcggtaccttcaaaatggacggcatccgaaatcaaggcgatgtatgaaggaatgaatgaactggcgaaactatatcagatggatctgattggcggcgatacagtttctaccgctgacaaattagtcgttacagtcactgtgatcggtgaaattgaaaagggacaggcctgtttgcgcagcttggcaaaaccggatgatattgtgtttgtaaccggtgaaatcggttcttctgcagcagggctttctttattgctggaagagactaatcctcaaaactcatctgtggaaacggattactttatccataggcataaacggcctgagccaagagtaagcgtcggcagattatgctcgtgttttaaacgggcagctttaaatgatgttagtgacggattggctagtgaactgaacgagattgcagaagccagctgtgtttcaattgaaattgatgaaagcatgcttccaattcattctgatttacctaagcttcatcctaactggaaagaatgggctttgtttggcggtgaggattttgagctgacagggacggtttcaaaagaggagtgggaagtgttgaagcagcagtgcgcagcacgtcaacttcccattacaaagattggccatgtcagggaaaaaacaaaatctaaagtgatcctaaaaacagatcaaacatcaatgatcttagagaaaaagggatataatcattttaaataagacgggtgactcgtgtgaagcaattaaaatggagaactgtaaatccagaagaaacaaaagcaattgccaagcttgcggcagcgtttgctaaaccgggagacgtcctgacattagagggcgatttaggtgcaggaaaaacgacttttacgaaaggttttgcagaagggctgggaattacacgtgttgtaaacagtccgacttttacaattataaaagaatataacgatggcgtacttcctctttatcacatggatgtgtatagaatggaagatgaaagtgaagatttgggacttgatgaatattttcacggacaaggtgtctgtctcgttgaatgggctcatttaattgaagaacagctgccgcaggagcgactgcaaattgtcatcaaaagagctggtgatgatgagcgggaaattacctttactgctgtcgggaatcggtatgaaatgctttgtgaggagttaagtagacatgacaatattagcaattgatacatcaaattatacattgggcattgcgctgcttcgagaagacactgttatagcagagtacattacatatttgaaaaagaaccactctgtaagagcgatgcctgctgttcattcattgctgaatgattgtgatatggcaccgcaggacctttctaaaattgttgttgcaaaaggccctggttcttacacaggagtaagaataggtgtgacgttggccaaaacacttgcctggtctttagacattccaataagtgctgtatcaagtcttgagacgcttgcggcaaatggtcggcattttgacggtctgatcagcccaatctttgatgctagacggggacaggtgtacacaggtctgtatcaatataaaaatgggcttttagagcaagttgttccagatcaaaatgtgatgctggcagattggctggagatgctaaaagaaaaggaccgccctgttttgtttttaggccatgatacttctcttcacaagcagatgatcgaggatgtgcttggaacaaaagggttcattggaactgccgcccagcataacccgcgtccttcagaattggcttttctcgggaaggaaaaggaagcagctgatgttcatgggcttgtcccggattacttgcggctggcagaagctgaagcgaaatggattgaaagtcaaaagtagggtgataggatgaaaacaaaagcagcggtcagaaatatgcggcttgaagatatagatcaagtatacgaaatcgaagcatcctcctttacgtctccttggacgaaggattcgttttatcatgagctgctggaaaatccatatgctcattatctcgtgattgaaaaggacggccatcttgctgggtattgcgggatttggattgtgatggacgatgcccaaattacaaatatagcgataaaaccagagtatcgcggccagtctttaggagaaacgctttttcgctcagctgttgaactgtgcaaagaaaaagacgcaaggcggctttcgcttgaagtgagggtttcgaatcatcctgctcaaggcttatataagaaattcgggatgcagcccggcggaataagaaagaactattatactgataacggggaagatgcgttaattatgtgggtgacgataaatgagtgagcaaaaagacatgtacgtattaggaattgaaacaagctgtgatgagactgctgcagctattgtgaaaaacgggaaagagatcatttcaaacgtagtagcctctcaaattgaaagccataagcgcttcggaggcgttgttccggaaattgcttcaagacatcatgttgaacaaatcactttggttatagaagaggcgtttcgcaaagctggcatgacgtatagtgatattgatgcgattgcagtaacagaaggtccgggactggtgggagcgcttcttatcggagtgaatgccgctaaagcattgagctttgcacataacattccgttagtaggcgttcatcatatagccggtcatatatacgcgaaccgtcttgtagaagacatcgtgttcccggcactggcattggtcgtttcaggaggccatacagaactggtttatatgaaggaacatggatcatttgaagtcattggggaaacccttgatgatgcggcaggagaagcctacgacaaagtggcgcggacgatgggattgccatatccgggtggaccgcaaattgacaagctagctgaaaaagggaatgacaatattccgcttcctcgcgcatggcttgaagaaggctcttacaacttcagctttagcggattgaagtctgcggtgatcaatacgcttcataatgcatcccaaaaagggcaagagattgctccggaagatttgtctgccagtttccaaaatagtgtgatcgatgtcttggtaaccaaaacggcgcgcgcggcaaaggaatatgatgtcaaacaggtacttttagccggaggagtagctgcaaacagaggcctcagagctgcattagaaaaggaatttgcccagcatgaagggattacgcttgtcattcctccattagctttatgcacggataatgctgcgatgattgctgctgctggtacaattgcttttgaaaaaggaattcgcggtgcatatgatatgaatggccagcccggccttgaattgacttcttatcaaagtctcacgagataatagcgtgagactttttatctgtttgttattaacagataattcacaatttatccacatgtctgtgagtaattatagagatatagatggataaagggctgaagtcactgttaataaagtggataaattcagaatattttgtggatattgtgtataaagcgcttactttgttttgcttattagggtatgttctgtggataaaaagcacctctaaaaagaggtgcttgacttttttaatcttcttctgtggatagttcttcccattcggacaaaagagattccagctcctgattaagcttctcattgtctgcatggatagcttgtactttttcatgatcctgatagacttcagggtcacatagcaattcatcattgcggctgatgttctcttcaatggtttgaacagtggtttcaatttcttcaatccgacggagtcgttggcgctctttctttttccattctttttcttcctcgtaggaacgtttggagtcagacttcacagtagctggcgttttttcagtttcttcttgctgatttattttctccaattcaaactgctctgtttttttctcagtataataatcgtaatctcccagatactcctctatatggcttgaagaaagctccaatactcttgtggcgattctgttaataaaatatctgtcatgtgagacaaataacagtgtgcctggataatcaatcagcgcgttttcgagaacttctttgctgtctaaatccagatggttcgtcggttcatcaaggatgagaaagttggctttttgaagcatcagcttagctagagccaatcttgctttttcgcctccgctcagtgaatgaactggtttcagcacatcatctccggagaataagaaatttccgagacacgttctgatttctttttctgggagcccggggtactcgtcccacagctcatcaaggacacgtttagaggaagtcagctcagcctgttcctgatcataatagccgacactgacatttgagccgtatgagatcgttccttgatctggttttagggtgtctatcaatgttttcagtaatgtcgatttaccaattccgttagggccgacaagcgctgcgctttctcctcttgtgagcatgaatgacacttctgttaaaagcggcggctggttttcatagctgattgtgagatcctgaacacgaaggacttcatttccgctctgttttgtaatatcaaaatgaaagtttgcggatttttcatcgccaagcggttttgacatgacttccattcgctcaagctgctttctgcggctttgcgcccttttggtggtagaggctctcgccaggtttcggtctacgaagtcctgcagctttgtaatctcgccctgctgcttttcatacattttaagatctttttcatactgcgcggctttttggtcgagataagcgctgtagttgccgtgatactttttgctttctgctcttgatacctcgtatacctggtttactactttgtccaaaaagtagcggtcatgcgaaacgatgagaatggcgcctgaatagccttgcaaataatgctcaagccaggtaagcgtatcaatatccagatggtttgtcggctcatcgagaatgagcaaatcaggctgtgttaacagaagcttacctaaagccagtcttgttttctggcctccgctgaggctttgaacctgtgtagaatcgtcaaaatggctgaagccgagaccatgcagcacagatctaacatccgcttcatattgatagccgcctttatctttgaattcctgctgaaggcggtcgtaggttttcatgatgctttctaattcaccggggtcagctgccgccattttttcttccatagcccgcatttccttttccattgcttttaagtggtcaaaaacagtcagcagctcttcttttatggtaagcttagaatccaagccagtatgctgagcgagatatcccattgtaatatctttcggtttaataatttcgcccttttcatacgaaagctggcctgcgataattttaaggagcgtagattttccggcgccatttcttccaacaatggcgatgcgatcacgatttctgacttccagctttatattgtttaaaatagtatcagcaccaaacgatttggacagctgattaacttgtaagatcatcatattatttcacctctgctataataagttaagtgtagcttatgaaccagaagtcagcaaacaatacattggccatataagacatagagaagaaaatagtgtatgatctgtttaaggagcgttttaatatgaatggattttctcattttaatgaacagggcagagcccagatggtggatatcagcgaaaaatcttcgactgtccgtactgcggcggctgtttcaagcgtacacatgaagaatgaagtgtacgagaaaatacagagtcacgatatcggcaaaggagatgtactggctgtcgcacaggtggcaggcattatggccgcaaagcaaacgtcgaatatcattccgatgtgccatccgctttcattgagcgggatagatatatcgtttgactggaaaataaaagaagcagaagttatacttcatataaaagcacaggtcaaaacaaaagggagtacaggtgtggaaatggaagcgctcacttctgcatcggtgtgcgctcttaccgtttacgatatgtgcaaggctcttgataaggggatggtcatcggccctactttcttgctggagaagacaggcgggaaaaacggtgactttaaaagagaactatccgagtataatttggaggaccaaaaatgaataaggatcaatcaaaaattccgcaggcgacggcgaaacggctgccgctttactatcgctttttaaagaatctgcatgcgtcaggaaaacagcgtgtatcatccgctgaactcagtgatgccgtaaaggttgattctgccacgattcggagggatttttcctattttggagctcttggcaaaaaaggatacggatataatgtggattatttgctgtcttttttccgaaaaacgcttgatcaggatgagatgacagacgtcatcttgattggtgtcgggaacttgggaacggcatttcttcactataatttcacaaaaaataataacacaaaaatttctatggcttttgatataaatgagagtaaaataggaactgaggtaggcggcgtgcccgtctataaccttgatgaccttgaacaacacgtaaaagatgaatcagttgccattcttacagtgccagcagttgccgctcaatccattacagacagattggtcgcattaggaatcaagggaatccttaattttacgccggcccgtttgaatgtgccggaacacattcgaattcatcatatagatttagcagttgagcttcagtcactggtttattttttgaagcattattcagttttagaggaaatcgaatagagggaaaggaggagcccaaatatgccgatcggtcctggaagccttgctgttatcgcaatcgttgctctgattatcttcggtcccaaaaagctgcctgaattggggaaagcagcgggagacacacttcgtgaattcaaaaacgctactaaaggattaacgagtgatgaagaggaaaaaaagaaagaagatcagtaagttaggatgacacgaatgaaagtgaatcaaatgtcgctgctggagcatattgctgagcttcgaaaacggttgctgattgtagcgctggcgtttgtcgttttctttatagctggattttttttagcgaagccgattattgtgtatctgcaagaaacagatgaagcgaagcagcttacgcttaacgcgtttaacctgacagacccgctttatgtgtttatgcagtttgcgtttatcatcggcatagtcctgacctcgccggttattctttatcagctttgggcttttgtgagcccgggtctctatgagaaagagcgcaaagtaacgctcagctacattccgatctctattttgctgtttttagcgggcttatctttttcatattatattttatttccttttgttgttgattttatgaagcggatctctcaggacttgaatgtcaatcaggtgatcggaattaatgaatattttcattttcttctgcagctgacgattccgtttggactgctgttccaaatgccggtcatcctcatgtttttgaccaggctcggaattgtgacaccgatgttcttggcgaaaatcagaaagtatgcgtattttacgctcctggtgatcgcagccctgattacaccgcctgagcttctgtcccatatgatggtcacagtcccgcttttgattttatatgaaatcagtattctgatatcgaaggccgcctatcggaaagcgcagaaaagcagtgcagccgatcaggacgtgtcttcggggcaataataaaaaatccatttctcatgagagaaatggattttctttatttttggttctttttgattttaaatgaaaaggcgaacatcttaaaagaaatgctgatgttgtaagcggcgaacaccatcagcaggatggagtaaaatgaccacatgctgcctggcgagcttgcggcaagataagtaaagatgcaccctacggcaaagtagatcattccccaaactaccgggtttctcataaaaataatcctccaataatcaattgcatttgtgtgctctgctgttcaaggtaattccgaacaggctcaagctgcatgatgacgacgaatgtattcatcattaaatgggcgaaaatcggcacccatatccgttttgttctcgcatataaaaaggcaaaggtaaagcccattgctgtatatagaagaagatgcttcaaatcagcgtgaacaataccgaagataaccgagctgatcagtcctgcaaaaaagaaattcgttttttcgtacagcgcgccgaaaatgatttttctgaagatgatttcttctaatataggcccgacgatggaagaaacgataatcatgagcgggactgcctgaatgacatccagaatcgcttgtgtattttctgattctcttccgatgccaaaaacataatattcaatagagcctgctattccttgagagaaaagggcaatgaaaaaaccggctatcgcccaaaggatagaaagtccgattgagtccttctgtccgtttcgcagcgtttctttcggaacggttctcagaatgagcagaacaacaacgagacaggcgataaagctgataacggaccataatccttgtgcatgcagcatattttcatctgtaggctgtcctccggcataaccgaatttaaataacaagggaatcgcgattaatgcggaaaactgcatgatgatatatgtcaaaataataaaccaatactgttttctcaaatggtatgtactcctttgttaagtgggtttcgttcatctacagctattgtaacataatcggtacgggggtgaaaaagctaacggaaaagcgagcggaaaagaatgatgtaagcgtgaaaaaatttttatcttatcacttgaaattggaagggagattctttattataagaattgtgttagcactctttagtgctgagtgctaaaattacatattcatactattgaggaggttattacattgttaaagccattaggtgatcgcgttgtcattgaactcgtagaatctgaagaaaaaactgccagcggaattgtgttgccggattctgcaaaagaaaaaccgcaagaaggcaaaatcgtggcagctggttcaggtcgcgtgttagaaagcggagagcgcgttgctttagaagtaaaagagggcgaccgcattatcttctcaaaatacgcaggtactgaagtgaaatacgaaggtactgaatacttaatcttacgtgaaagcgacattttagctgttattggctaattcttaaataaacaatatttaaaacatttgaggaggtcttgtaaacatggcaaaagaaattaagtttagtgaagaagctcgccgcgcaatgcttcgcggtgtcgatgcacttgctgatgctgttaaagtaactttaggaccaaaaggacgcaacgtggttctagagaaaaaattcggttctccgttaatcacaaatgacggtgtaacaatcgctaaagaaatcgagctagaagacgcgtttgaaaacatgggtgctaagcttgttgctgaagtagccagcaaaacaaacgacgttgccggtgacggtacaacaactgcaacagttcttgcgcaagcaatgatccgtgaaggccttaaaaacgtaacagcaggcgctaaccctgtaggcgtgcgtaaagggatggaacaagctgtagcggttgcgatcgaaaacttaaaagaaatttctaagccaatcgaaggcaaagagtctatcgctcaggttgctgcgatctctgctgctgatgaggaagtcggaagccttatcgctgaagcaatggagcgcgtaggaaacgacggcgttatcacaatcgaagagtctaaaggcttcacaactgagcttgaagttgttgaaggtatgcaattcgaccgcggatatgcgtctccttacatggtaactgactctgataagatggaagcggttcttgacaatccttacatcttaatcacagacaaaaaaatcacaaacattcaagaaatccttcctgtgcttgagcaggttgttcagcaaggcaaaccattgcttctgatcgctgaggatgttgaaggcgaagcacttgcaacacttgttgtgaacaaacttcgcggcacattcaacgcagttgctgttaaagctcctggcttcggtgaccgccgtaaagcaatgcttgaagacatcgctgtccttactggcggagaagtcatcacagaagatcttggccttgacctgaaatctactcaaatcgctcaattgggacgcgcttctaaagttgtcgttactaaagaaaacacaacaatcgttgaaggcgctggcgaaacagacaaaatttctgcccgcgtgactcaaatccgcgctcaagtggaagaaacaacttctgaattcgacagagaaaaattacaagagcgtcttgctaaacttgctggcggcgtagctgtcatcaaagtcggcgctgcgactgaaactgagctgaaagagcgtaaacttcgcatcgaagacgccctgaactcaactcgcgcagctgttgaagaaggcatcgtatccggtggtggtacagcgcttgtaaacgtatataataaagtcgctgcagttgaagctgaaggcgatgctcaaacaggtatcaacatcgtgcttcgcgcgcttgaagagccaatccgtcaaatcgcacacaatgctggtcttgaaggatctgtcatcgttgaacgcctcaaaaacgaagaaatcggcgtaggcttcaacgctgcaactggcgaatgggtaaacatgatcgaaaaaggtatcgttgacccaacgaaagttacacgctcagctcttcaaaacgctgcgtctgtagctgcaatgttcttaacaactgaagccgttgtcgctgacaagccagaagaaaacgctggcggcggaatgcctgatatgggcggcatgggcggtatgggtggtatgatgtaataccgacaaaaaacccttgatttacaaggggttgtcggcaacggacgtcatttttgatgccctttataacttttcgaggcttctcatgagttcactgaacttgtgagaagcttctttttttctgtctttcgtagtttgattttttcagcactgttctatatcgattttcaatagttttgataatcccgatatgaactattcaattgaccaaaatacaaaattctaccggctcagattcctgtttacgtcttctttgataaacggcttactgtaacttcagtaaactgcatttctgttatgattataaaaagggtttaaaaatttttcgtccaaacctctgttacttctctccctattgcagacaggagatggtatcctctcatacagacaaaaaagccccagttttctaaataaatagtgtcaccaacactcttagaagtttccctaaggagtacattgccaaagagaaatcctattaaaatgtctatttgtgctgctttttagctactaagacgatgtatgttaaagatatagaacggcagaataatctgattctcaaaaattcactgtcggtgtagttaggttcttccaccaacatcttgataatattcatcccgactctatggagaccgacattccaattattaaatctaatattagttttttatgattaccaaggaggacttaatagtgcatttttcagaaatgatagatcgcttggctttatatgatttacacagaaaaagaagcaaagataaacatttttctgctgctattgcagccgatatcgatgatagagaggaattttacagtgcgaatatagctgatgtttcaattgatttgaatgaatctaaaaaaaagtatagggttggaacatttcgttatgaatccttaattcaaactgggaatcctgttaatgatactttaaaaggggaggtttttttacataaaaatgatatagatcaacccaatgttatctttgtacacggctggcgcatggaatcgtacaataggatcaaaagaatatttcataagcgtataatgaatgatttaggctggaacatgtattattattctcttccataccattttgaaagagaaccggaaaattcactgtatagtggcgagttgatgattagtgcgaatattgatcgtacaattgagtcgacaagacaggccattgtagatttacgggcattaattcactggataaaagcaaataaaaaaggccctgttatcatagtgggggtaagtttagggggatggatcactaatctaattgctaccctagaatctcaaattgatgtagtggtatcaatcttttatgccaatcgcctttcttattcaatatggaacacgatcccaggtaaattcataagagaagaattagaacaaaatggtgtgacctatgaagatttaacaaaatattggaatatcacagatcctagtcaagccttgccgaaagttaataaagataacattctgctgatttctgctaaacatgatcagtatattgacttaaaagatgcagattatttatgggaaagttgggagaaaccgaaaagatatgtctataattgcggtcattccggcattgttctttgtcgcaaaaagctggcaaatgatacgatttcctttataagagaaaggataaatacgggaaaacctggttcagtacatttgtagaccttaataagaaacaaaaggccaactgcaacttcagttggccttttctatttataataaagaaactgggtgagattgctgtcagaactactatgcgtactagtcgttttctttaatcaccattgccagttcttccacctcaccccgaatcccaatcgcaggctcccacgaatcaatcaaacgaatcgctctctgattagcttccatcgctttcgttttctctcctttacggttcaacagctgcgccatcccgtaaaaataatagatcaactcaacctgattggcgttatgtttgtcatagagcatttgctcaaaggcttcttccgctttctcaaattgaccacatttcacgtaagcgacacccagattgaaataggcttctatcgttttttcgccgccgtacgtggagctgatttcatttgccgcttcgtataattgaatggcttcttcatgatgacctctcgcaaagcttaagtcaccgcgaaccaaaagaactctgtgttgaatggtaggagaaattggttgatcttcgatttcgtttaaaatggtctctgctttttcctgttgcccgtcttttaaaaacagccttgctttgagtgcatgtccccaaacctttagatcataggcatcgtgagcatctgattgttcaagaatcttcagcccggcttctatttgctgtaaggccctgtctaaatcattgacttccatcagagcccagcctgctgtgtcgattcggaagtacgcttctcgtgtgtgttggcctaagtgatgggcggcgtcggccgctttgcgtccgtattcgattcgcaggggcaggttgattctgcttagaaaatggctaatgcgggtgatgagttcgattaggatttctttttgttcagtttcacttgcccattggatgacctttaagatgtttggccattcttttttcatttgatctaagttccgtcccagcaggtagctccaatagatagagttgggctgttcccgctttaaatgggtttcggcataatcaacataatagtgcgcccagcgattgcgggcttctttttcatattcgtgctgttcggacaagtgctgttctccgtaagcgacaacggtttggtgcgctaagtattgtgtccttccttcgcttcgttccggctgaatcagagcgtatgaccgcatttgttccatagcgtaatgaaaacggcgggcgtctaatccggctgctgccgccaggcttttttcatcaggcggcttgctgaaaaagcaaagcgtctgccagagctttcgtgtatcttcattgcatctgtcccaggtgcggccaaagaggaattcaaacaattccagcagtgagtagcctgcttttccaagctcatgaatcaactgctgcgcggggatgtcatcgtctgacatataggcgatgctgagtgccatggctttcgggtttccagcagtcgctgaaatgaattcgtttttcagatcagatgatagatgtaacagctgctccagcttttcccgcttatgtgggaggttgcatgtttgtaagcagcggtgcacttcttgctggaaaaatttcaaggcatctgtttggttaaggccgctcagctgaatagctgtcatttctccgaagctttcccgataagtttgctttacgttttcccgcgctgtgaggagaactttcacgccttgcggaaggctggtgataaattcatgaatgtcacgttctgcagtatcaatgctgtcaacgatcagcaggatcggtttttctctagtgtaattagctaacgcattgcggacgacgaatcgtttttcattgattgatttatcgatttgttctgtacgtccgagctgataggcgatcgtatttaaaaaatcgctaaagctcaatcctttccaatcagcgctgacccaaatgatactgttgaacgccggccaatctgaagtatcgtcgacacaggaataggctgcttcaagagcgattgtggttttacccataccagcccagccggtgattaaacagactggtgacggagaaagcatccattgccgtatcgcttccatatcaaagctgcgtccgataaagcgtccggaccagcgtgagggtaaattatgagtgataggctgttctgtaagcgcattcgtttcatggccgggtctgtcatgaaacagccgttttactacattttcaatttcgtcttcactcggagccccgaataatccgtcttttcgcagtattttcgcttttttcaaacaggatgctgcccatacaggcaatgcgggtttgatgactgggatagtggtggcttccagcaagtcggtcaaccactcgatatccaagtcggtcttttcgagaatgatccagatcattccgaacagttttccgtcgtcgattcttccgggaatgtagtttgctcccatctgtccgatccagcttttgatcgtgtttggggagactcccagctggagtgcgattttatctatgtaagactgtcctgttttttcattctttttccttctgattttataatcaggatgaagttttagcgttttgacgccaggtgccagcagttgtgcaaattgttttcggttttcaagttcagccataagcctgcacctcctattagtactattttatcaatccagcgttttttgtatatgaaaaaataaaagtacagtgccgctgtccttttatacagcaggaaaggctgttgaacgtgttgaaaagcagataaaatgggggcagtaacagagaaaacaaaaatgtatgcacttacattttattttctaaagaaaggaacttgccaaatgactcacacagtacctcaaaacatgaaagcggctgttatgcacaacacaagagagatcaaaattgaaacattgcctgtgcctgatatcaatcatgatgaagtgttgattaaggtgatggctgtcggaatttgcggatctgatctgcattactatacaaatggccgaataggcaactatgttgtggaaaaaccatttatccttgggcatgaatgtgcgggtgaaattgccgctgtcggatcatctgtcgatcaattcaaggtgggagaccgcgtcgctgtagagccgggtgttacgtgcggacgctgtgaagcgtgcaaagaagggcgctataatctttgcccggatgtacagtttttggctacaccgccggtagacggcgcgtttgtccaatatattaaaatgcgtcaggactttgttttctctatcccagactcactttcttatgaagatgctgctttgatcgagccgttttctgtcggcatccatgcggcggccagaacgaagctacagcccggatcaacgattgcgattatggggatgggccctgttgggttaatggctgttgccgcagctaaagcatttggggcaggcacaatcattgtcaccgacttagagccgctgcggttagaagctgcgaaaaaaatgggagcgactcatattattaatatacgtgaacaggatgcacttgaagagattaaaacgatcacgaatgatagaggcgttgatgttgcttgggaaacagcagggaatccagcggcattgcaatccgcactggcttctgtgcgccggggcggaaaattggcgattgtcggtttgccttcacagaacgagattccgctcaacgtgccgtttattgcggataatgagattgatatttacgggatcttccgttatgccaatacgtatccaaagggaatcgaatttctcgcttccggcattgtggacacgaagcatctagtaacggaccaatattctctggagcagacacaagaggcgatggaacgggcgcttcaatttaagaatgaatgtttaaaagtgatggtgtatccaaatcgctgagtgaacagggaggatcttcgtattctccctcttgtttactggaaatgaaaacggattcttggggtgggaaatgatgattgaaacagaaaaagtaacggcaatgaaagtgaagcatcagtcaaaatccagtaccggactgtcctggtttgaacgaatcggttatggattcggtgatatgtcgtataatattatctttcagtttgtaaacgcatacttattattttattatacagacgtcggcggcattcagcctgcggtgatcgcaactttgtttcttgttgtgcgtgtgctggatgctatttttgacccgatcatgggattgattttagataaaacgaatacaaggtggggaaaagcaaggccatatttgctgtgggtggcatttccttttgcgctattcacattcttatgtttcacgacgtctcatttcggtgagaccggaaatatggtatatgcgtatgtcacttatattctgcttgggatgtcctttagtatgcaaacgatcccggtgaacagcttaacggggcggatgacgaattcggtggaggaacgaacggttctgaccacaacccggatgattttggtgtatatcggcattcttttatccatttcctgtgcgacaccgcttgcaactgctatcggaggagaggatcaggcgtttggatttcaaatgacggcgctcatctatgcggctgtcagcatcgttttgaatctatttagtttcttttctgtacgggagcgaattcagcctaaaaagagaaaaaaacaagggatcaaaaagacattatccgttttattccgaaacaaacccttgcttatgttaatttcatcatttttggcttttgcgatcgggtttaatattaaactcagcacgatggtgtattattttacgtataacgtcaaccataaagagttcgtatttatgggcaccgttttatttttcggagcagcgctgatcagcaatttgtttattcctttcttttctgagaagtggggcagaaaacaagtcatgatcatcacggcagctctatcgcttatttcttatgccggcctgcattttacgccgtattcttccattacactcattttcatttggcttttcgtttcgggatttttcacaacgcctttaaatacgcttgcttggggaatggtggctgattgcgtcgattatgcggaatggaaaaccggagttcgcgcggatggtgttgtgatttcgagcatgagctttattaataagctgggtgttgcgttagccgggtcattttcggccatttacttaggaatcgccgggtatgtggcgaatacagaccagacagttgcgtcattgaatgcgattaaaaatatgaatgctttgattccgggatttttcattttgctttctattattcttatcgccttctatcctttaacggaaaaaagatataaacacatcatctctgagctggagcaaaggtctgcgagataaatagatgtaaaatttttaatattcaatgttgtatttatggcagaaagtaatatactgagactgtaatctagactttataaatgagtgtgataatatgcgtagtcattctgtagtttgtattggggaattgttgatcgatttcttttgtaccgatgttgacgttgatttaatggaagggcgccaattcctgaaaagtgccggcggggcaccggcgaatgtgtcggcagcaattgccaagctgggaggagacgccgctttcagcggaaaagtaggaaaggatccgtttgggtattttctgaagcaaacattggacgctgtacacgtcgatacctctatgctggtgatggatgagaaagcgcctacaacgcttgcttttgtttcattaaaacaaaatggagagcgtgactttgtttttaacagaggcgcggacgctttgtttacgctggaggatattgaccatgaaaaactaaacgaagcgaaaatccttcatttcggctctgcaacggcactgctatcagatccgttttgctcagcctatttacggctgatgtcgagtgcggaagacaatggacagtttatttcgtttgaccctaactaccgtgaagatttatggaggggaagagtctcagagtttgtaagtgttgcgaaaaaagcgatcgctgtaagtgattttgtgaaagtcagtgacgaggagcttgagattataagcggtgtgaaggatcatgaaaagggagttgcgatccttcatgagatcggagccaacattgtcgctgtgacacttgggaaaagcggaacgcttctttccaatggaaaagaccgtgaaatcattccaagcattccggtgacatcaattgactcaacaggggcgggagatgcttttgtcggtgcggctttatatcaattggcaaacacggatcagattcaatctgtagatgctaattttgtgaaactgcgtgagattgtgtcgtttgccaataaggtcggagctcttgtgtgcactaaaattggagcgattgatgcactgccgagcttggatgagattgaagtttctttgtaaacattgaagatgtttcttgaaagtctttggacttttggaggcatctttttttattgcttacatttttgttcgggtaaaaagttgtgtattttttgtttgaaatgtcattttttattaaaaaagtgaaacttttaacgataataaatagtatatgtaacaagggttaccgaatttgctttaggaggaacgatataatgagtataattggaagatttaaagatattatgtctgcgaatatcaatgctttattggacaaggctgaaaatccggagaaaatggtagatcaatatttaagaaatatgaatagcgatttggctaaggttaaggcagaaacagcagctgttatggccgaggagcagagagcaaaaagagaatatcacgagtgccaggcggatatggaaaagatggaaagctatgcaatgaaggcgctgcaagccgggaatgagagcgatgcgagaaaatttcttgaaagaaaaacatctttggagtcaaagctttctgagctgcaggcggcgaatcaaattgctgcaaccaatgccgcacagatgagaaagatgcatgacaaattggtatctgacattggagagctggaagcacgtaaaaatatgatcaaggcgaagtgggcagtagcgaaaacgcaagaaagaatgaacaaactgggcgcttctgtttcaagtacaagccaatcaatgtctgcattcggccgaatggaggacaaagtaaataaggcacttgatcaggccaatgcaatggctgaactgaacagcgctccgcaggatgatatggctgatctgactgcaaagtatgacactggcggttcaagccaggttgatgatgaacttgcggcgttaaaagcgaaaatgatgctcgataagtaatacataggaggccgcagctctcggctgcggcgtcattttatcataagatgtgagagggaacggtaatgataatatcttataagtgtccgaactgcggcagtgatatggcatttgacagtgaaaccggctcgttatcctgcagcagctgcggaagacaggacaatattgaaagccttccgaaagaaaacattgcggcacggttttctgatgatgaagcaaaagaatatcaatgtgaaaactgcggtgccgttttgatcacggaagctgaaacgacagcaacgacgtgcagcttctgcgggggtgctgcaatacttgccgatcgattatcaggtcatttggcaccggcgaaagtcatcccatttacaatcagcaagcaagaagccgagcaggcatttcgaaagtggtgcaaaaaaggccttctgacaccaagaggtttcatgtctgccgatcgcattaaaagcatcaccggcatgtatattccgttttggatgtttgatttaaatagtgaagtacaggtgagagcaaactgtaccagggtccaccggtatgaagaaggggattatatttgcacggaaacagagcactttgaagcatttcgtgatatcaatctcgattatttgaaaatccctgtcgatgcctctgaaaaaatgaaagacgaattaatggacaaattggagccttattcatacgaagagctgaaggactttcaaacggcatatttggccggttatattgcggaaaagtacaattataccgatgaggagctttttccgagagcaaaagagaaaatcagcagttatatagattcatacatccattctactttttccggatatacgtcagtcaatgtgagggacaaacatattcacacgaaaaacgtgaacagcttttacgttttgcttcccgtttggatggtcagttacgattatgaaagagcagagcatatctttgcgatgaacgggcaaacaggaaaggttgtcggaaagccgccgatcagtcgaggaaaagtggcggcatggtttagcggaatagcaggcgggacatttcttgcgttgaagctcgtctcattgatgatgggaggcggattttgatgcgtggattttttggaaaagcgatctttgttgtgctggctgttttcatcatgatgcctttactggggatcgaagcggcaagagcttctgaatcacagcagcatgtgtacgatcgcgctcatctattgtcaaaagcggagatcggaaaacttgaatctctctcggcagagctgggtgcaaagagggacactgatttcatcattattacgaccaaaagcacaaacggtgaagatattgcagactataccggcgatttttatgatcgttacggaaaaggcagtacagctattttaacgattgatatggcggatagagaagtattcatctcgggctacgaaaaagctgaaaagtatttggacaacagcaggctcaatagcatcagaaatacgatttcatctgatttatccaatgaaaattattttgaagcttttgagacatatattcagctttcctataaagatatgggcataaaaccgggagtaaaccccgacaacatattctttacatggtggtttcagctgattgctgccatcgcagtcgggggaattgcggtttcaatcatgctttatcatgcaggcggcaaagtaacggttaatggaaatacatatatggatcagcgtacgtctgatgtgattgatcaatacgacacttatattagaacgactgtaacaagagaaagaaaaccatcagataaagacagcggcagcgatggcggtgttacgaaaggcggcacgtcatacagtgggagccgaggcagtttctagtagaagaaaatagagaaagggagaggcgtaatgtcgtttttcagaaatcaattagcgaatgtagtagagtgggaagaatttagagatgatatgattttttataaatggaacaatcgtgaaatcaaaaaagggagccgtttaatcattcgtcccggacaggatgctgtctttttgaacaatgggcgggttgaaggagtctttcaagatgatggcgattatgatattgaatcagaaattattccattcctttcaacgttaaagggctttaagtttggctttaacagcggcatgcgagctgaggtgctgtttgtcaatacgaaggaatttaccgtaagatggggaacaaaacaggcgataaatattccggcagcgggaatgccaggcgggatacccattcgcgcaaacggcacatttaattttaaggtgcaggactatatcagcctgattgataaaatcgctggcgtgaaagatcaatattttgtagaggatattaaaacccgtatcatttctattctggatcagcttctcatgaagtggatcacaagagaagggaaagatatgtttaatcttcaagcaaacgcttttgatattgccaagggaattcaagaggacttggatatgcaattaataagcgacgggatgacggtcactggttttcaaatcatgagctttaattatcctcaagaggttcaagatatgattacaaagaacgcttcctatggtatggttggggatgtgaacagataccagcaaatatcaatgacggatggaatggcatccggaaagatgagcggaggcggagcggcttcggatatggctggaatgatgatgggaatgaatatggccaatcagatgatgaaccaaatgaatcaaaatcagcaggcacagtcatcaggcccacagtcaactggcagcggaagcaaaccgaatttctgtccaaactgcggaacaaaaacgggcgaagccaatttttgtccgaattgcggccagaagcttgtataagaatcatacagtgaaaagtccggagtgatcagacactccggacttttttatttaggagaataagcgttacctattgcttgctcctgaacaggccattttcgagcacccgcttggataattcccagcagcaattgacgacgttcctttattgaattgacggcaatttgaaatgtttgctttgataaagccggtatgcctgattgttgaagctttgagatatctggttccggcggcgcttgttctgcaggatggatataggcagtatgaacggtatccaggtagtttttgatacttgagcgcgcttctttgatgtgaagctgattcggctgatattgttcaggaattccgtatttgaaaatggttagagcctcatccaatacagcaacagctataatggatgattcctgatgctgcgtgctgtggtaaaaatgaaggatggggaaggcgttatgctgagcggtcagctttcccagttctgatgaggcagcgacaagaagaaaatcaatgtcgtgaaaatctttgccattccatgcattatggacgatttctgttccgtcatgtcctagacttaatacactttgggcaaaggagcgtttttgattaaccgcactcaagacggaaatcaaatacgtgacagaaaacgtgatggtaagcagtccttgagctgtttcaataatcgtgacaagcttccataggcctccgttcggagcgaggtcgccatttcctaatgtaaacatgacatagccggaaaaataaattcggtctgaccaggaagccggttcttttgattgagtttccataagtgagtgagggtcactcgagtaaatcaaaacccacccgctccaaaatagactgatccatatcactaacgtcaggcataacagcagaggaccagccatacttagaacctttgcgtggtcaccgctgattttgcggcaacccttccacagccaggcagacaggcatcttgtgatcgggccggcaccgctctctaaccataacgtggtccataaaaaatcaatcatccctgctgtcaataataaaaggcctgcaatgatataaccctcattcattttggttgcctcccttaagtcagccttcttttattttcttctctatttccttttatcctaagtctgaaacaattgaacgaatgtttgattttagatgaagttacccaaaacttactcatttatcgatatgaacagaaaatcacaggatttttgacttgattcacacatttttatgaagaaaaacgttcattttccccttgaattggtgattttccttttatagagtaaaaaattttcagaaatttatattgactgaaagcgtttttataattatgataatatcagatataacaaaaatgtcactattatattactacaattgaactatcaagtgactattaaatgccaaatttacaaggttatgcacaaagaaatgaccattgttcttttagcgagaaatgaaatcgtttccatcaggactgacatgctaagaagaagggaaggttatgaggttattggataaaaacatgaacaactattttctgaagcctgcttacgaaatgtgaggaaggcagcagccctggaataagtttttgacatacgcattttgaaaaagactgggggaaacagtatgaataaacaaggcaatcaaatgtcatttttacgtacaattattttagtctccacttttggcgggcttctttttggctatgataccggtgtgctcaatggagctttgccgtatatgggagagccggatcagcttaatctcaatgccttcacagagggccttgtcaccagttcacttctttttggagccgcgctaggtgctgtgtttggcggcaggatgtctgattttaacggccgccgcaaaaatattttgttcctcgctgttatattttttatttcaacgattgggtgcacgtttgcaccaaatgttacggtcatgattatttcccgttttgtgctcggtattgcggttgggggtgcatccgtaacggtgcctgcctatttagcagagatgtctcctgtggaaagcaggggacgaatggtgacgcagaacgaattgatgattgtatcaggacagcttttggcctttgtttttaatgcgatccttggaacaacaatgggagacaactcccatgtgtggaggtttatgctggtcattgcgtcacttccagccgtgttcctgtttttcggcatgatcagaatgcccgagagtccccgttggcttgtttctaaaggaagaaaagaagatgctttgcgtgtattgaaaaaaatcagggatgaaaaacgggcagcagctgagctgcaagaaattgaattcgctttcaaaaaagaagatcagcttgaaaaagcgacatttaaagatctttcagtcccatgggtgcgccgtattgtgtttattggattagggattgcgattgtacagcaaattacaggtgtaaattcgattatgtattatgggactgaaattctaagaaattccggtttccaaacggaagccgctttaatcggaaatattgcgaatggcgtgatttcggtattggcaacattcgtcggaatctggctgctgggaagagtggggcgccggccgatgctgatgacaggcttgatcggtacgacaacagcgttattgctaatcgggatattctcacttgtacttgaaggatcaccggcacttccatatgtagtcctgtcattaacggtcacatttcttgcttttcagcagggcgccatttcaccagtgacttggctgatgctatctgaaattttcccgcttcgccttcgcggactgggaatgggtgtcacggtattctgtctgtggatggtgaattttgcagtcagtttcacgtttccgatattgctggcagctatcggcctgtccacaacgttctttatcttcgttggattaggaatttgctctgtcctgtttgtgaagaggtttttgccggaaacgaaaggactttctcttgaacagctggaggaaaacttccgtgcttatgatcacggcggggcgaagaaggattctggggctgaagtgattggataattaaaaaaagaatccgcacccgagtgcggattctttttggtttcaaattagttaggtctgacaaggattttgacttggcttttctctttaataagagccccgaagccttcctcgatcaaatcatctagtacgatttttttcgttacgagtttgtcggctgagaaatagccttctttcattaatgacaatacagccgggaagatgtcacggtatccgataattccttttactgtacgttctttgattacgatatcgttcggatggatttcagcacctttttcccaaatgctgacgatgacggtttcaccggcaattgtagtggactggatggcttgtcgtaacaccactgggacaccagtgacttcgaatgctacgtcaacaccgcctcctgtacgttctgcaatctcagcgactacatcgtctgttttagacggatcaacgatgatcgcgccaagctcctcagctttttgctggcgttcaggagaaagctcaacagcgtaaatatcagttgcaccggcagccttcagcgcttcaatgacaagaagtccgatcgggccgcagccgaatacagccgctttgtcgcctgctttgagtttgcttgagcggacagcgtatagagcaactgcagaaggttcaacgagcgcgccttgttcatatgataattcatcaggaagtttgaacaaaagctcttcatctacagagacgtattcagagaaaccgccgcctccgccggctaagccgaggaatcccatttgttcatcaaggttgtaggcgccttggtggccgtgtgtagcaaaaatcggctcgactacgacgcggtctccaactttataattttcaacgccttctccgacttcgacaacttcaccggagaattcatgccccattgtgacaggtgccgtttcatttgttaatgggtgcggtttgtcaaccggaataaagatcgggccgcccagatattcgtgtaaatcacttccgcagatgccgcaccatttgactttgatctttacttttcccggctccgtttttggctcttcgatatgttcaatacggatatccttttggttatgccatcttgctgccttcatggattaccactcctataacttttgatgtgagtaattccgcaccggtcaatatgaactgttcacaaaatcgccatttttaaaaccaaaaaagaaatgaaatttttatataatataatctacgtttttttgaaaaaagaaactttgaagaaaaaagggtctcgcacactcttttttctttatatgagagtatcaatcgtttacatagctatgaatttggtttgaacaatacggtaatggttcgttcatattgaatgcgacaactactctatcaataattataacgctaatactgctattataataggataatcttccatggtttattttagcagagtaacttttttgactttgtaacattactgtaaggatattgaaataaaaaatagctggttgatcgtgtataatcttcctagatgttaacaaacagggggacgaaatgttgaagaaagtcattttagccgcttttatcttagtaggaagtactttgggagcttttagtttttcatcagatgccagtgcgaaacatgtgaacggaaatattacttggtataatggagtcgggaaaaaaggctcttcaggtaagaaacttggacattgggattgtgcgaccaaaatcggatttgatgttcctagaaacgggacaaaaatcagagcttatgcaaaagcgaagcctaaaaaggtgattacggtttataaaaatgatgttggcagaatgcctaatgcagtgctggatgttagccctaaagcgtttaaagcgcttggatatccattaagcaaaggtaaagtagcggggcattacagctattaatgtacatatataatctggaaagcaagaagtcacattcttgctttttctattggtggagataaaagatgaaaaaaagaatcatattattattagcagtgataatagcggcagctgccgcgggggttgcgttttatgttgcaaaggataaaggctatgagaaggctgctgatgtttcagtcaataccgaaagcggtgatgagctgctggtttcaattacagatacggatctgctgacaaagtattatgaaaatgacaaggtgatccatgaggagaagctgaccagctatccggcatttgccttggatcaaaaacagcaggtgctctattatacgggcaataatgaacagaatgaaatgaggctttttaaattggatctgaagtctcataaaaaaacgatgctttataaaggcgcggagagtgcggacagtttgtttttatcaaaggaccgttcaaccatctatttccgcttaggaaaagcggacgaaagcaattttcggatcgccgcttttgatctgaaaacgaaaaagtacaaaaatctttatcctgccgctaatgatcaggataacaccgtcagcagcttcttttataaccaaaaaaacgattcatttgcattgcttcattattctgtagaagaagactacaagaaaacagatgaagcaaacgaaaagggcatcgacccagaaccgacaacgattcattttgcggaaggccgccaaaataaatttaatgagctgaaaagcctgaaccaatttatcagcgatattgctgtttctgttgatgataaacgtattttattcacatcatatacgcaaaaaggaacggagcaaaccgcttctattcaaatgctcaatgcggatacgaaaaaatatgaaagcatcatctcaaatcaaaaatcatttaagctgttaattgacgcacagcctcagttctctaaggatggaaagaacatttattttcttgccgaagccaagggggctaaaaagctgaaggacgaaacagggcgtgaagctaaggtgcggacgatttattcctatagccttgaaaataagaccttcaaaaaagtatgggaaaatccgaacggcatcatcaacagcttttctgtgattaactaataaaaaccactcggcataagctgagtggcttttttaatggacgaggtgcagggctaatgattcgagccatttaaagatatgaatcagaggtaccgacaaaaacagaagttcaacatatgagttcattgcaacattcagctttttgaacgcagctctttttttcaagtctttttgctgctggtttgagatcacgttatcactcctcgtatatccatattataccattgaaacagacaaaaaaagccctaaacgtttacagttttgggcttctttcttcgtatttggcctcttgcaatgagaggcttttattctgaaatatagaattttgtctccgttcggggtttgttgcttgcgggagactgcatttgttatagggaagaactagcttgttttcgtttggctgttgttttggagattcactaatgaacggatgccgtcgaccattttacttccgcacaaagggcacaatggcgtatcactgctggcgaagttttttcgggtccagccattacagtcttcttttgtgcattcccaagtactcacatcttcttttggcagcggttcttgatttcgtttgttatagtaagacataaagtcacttcttccctcatgtattttactgcacatttcttattgtctcatacttttccctaatctcctaattcctttttctttatgactttccaataaccccatctaaaaaggagaggagtgtgctgttaaaagcatctggctcttctaaaaacgggcaatggctgcttttaggaaaggtaacgagtgtcgcgtttggaatattgctgcgcaagtgttccccagctgctgtagagaaaaatttcttgtcttccccgaagcacagcaatgtcggcacattgatgttttggagggtgccccggtaatcagcggccgtttggttaaataaaatcgtgctagaaatggcagccggctgtttgaggatttctgccagcatccattctgtttcggtctcggcaggcggttctgcgaacatattctggatgaagctttcgtagaaaggcagcgggtcagtttgaatggcgtgcatcgctgtttttaagccgtcaaaatcaaatggaccatgttcccagccctcccattgatagtccgaagcggattgatcgatgatcacagcggcttgaatgttatcattcccaaactgattgagataatcccatacgacaaaagcacccattgaccagccggcaagaacgacatgatcaagctccattgcatttagaaattcccttatgtcacgggcatattgggaaatggtgtggccgtgaagcactttgtcagattcgccgtgtcctctaagatcaagacgaatacattgataattggcagaaagcgccgaaaattgtttgtggaaaaattgtccgctcatcagcaccccatgtataaacaggatcggcgtcccgctcccgtgtgtttcatagtaaaggcgtgtctgatcttctaatgtgatgtatggcatgtttctcctcctttagtttccatcatgagtatggctggctgctgttgagctgatgatgacagctgtcgcggctgcctgctgcgcttgaatggctgtttcgatagcggtgtatagtcctgattccatcagcagatttttctccatatgctcactgagatagaggctgacagcaattttaaaattcatttccttttgccatttaaaagctttttcctggtttaattcgtcagtgatgcacaaaaccgttttgatatctggctcttccagaaatgtgaggagagcaaggtctggataatgataatcctttggttttttgacagattcagtgatcgattgatatatctgtttgcaagcggaaacaagcatttcgggctctttttcactttgcaaggccagaatatggctgacctgatgtaagtactgtccttttttaaagccgttggctgccagcagctgatagcatgtttccgccttctgtagcgcctgcaaaccttctccgttttctccaagcagtacggcaagcggaacattctgagttgaagtgaggaaataatgatttttcttcatctgctgataaactgctagccccatgttcatctgttctttttggtttgtcgtttcagattttccggtgagcaagatcagagcggaaaggtatgtgaacatatcccgcttatatcctagcttcaccatttcattgtatacatcgataaaagtatgaaatgtttgttttgcctcatgctgaaaatgaatgtccagaatagatgcaacagtaaagcggtggtgtgaattgagtgttgagaagctgccgatgtttgatttgatatagctgctcaaatcataaaagcgctgaaaatcaaactctcttttattcacaatatatgcagaagaaatgagcattaatatctgatcgtgtgaaactttccattttaattttgattttaatttagcataaatggaaatgtattgctttattttttcatgtagatcgtgtgtgagcataaaaagcagctccttttgttgtttttacgtaatacgataaatagggccaaaggtttcataaagaaaaaacttgcctgctagaggcaagtttgtcggattatttatggggatctgttatatccatcggtctcatcatgtcatagtcttcatgctctagaatatggcaatgccatacgtatcgtccgctgtacggaccgaatgtcgccgcgattctcaggacttcacctgcatgcgcttgaatggtgtctttccagcccttttcacttggcggcggcgggacagccggaccggtataggacaattccccgctttcttgataacgggcgatatcaaacggccgccggtctaatacacggaaggagactagatgcaggtgaatcggatgtgttccgcgtgtcgggttgataatggaccatatttcagtagtgccgacttttggtgcttctgtgacgggatcgtgccagcgtttgttattaagcagaaggacgggtctgccgtattcgtcctgggtgcctgccagttttaacgttctgatgttttgtattctttcatgctgtaccgaagggtatgaggcgaggtacttcggctttctgctttcgtctttttgtgccaatggttttgtgactctgaattgcatgatattagcatctgtttcaggattgacgtcaccgccacagcccgcgctgtttgccaaaatgatcgattctccttcatatgctgtgaagtcaatgatgatatcgtaacgttcagcaggcgcaaggctgaaagaattcagtttaacagatcgcggcaggagacctccatctgaaccaatctgaataaactctccgccattatcgagtgacaggttataggttcttgtattggaggcgttgatgactcggaatcggtatttcctcggctcgacctccaagtatggccataccttcccgttgacgagtatggtttctccgcaaaaagccggaacgattgaaggattaggcagtgacggagaagggttttccggtgcgctcggataaaacaaagaaccgtcctcattgatcgtgcggtctgtgataagaagcggcacatcgtattcgtctgaaggcagttttaagcgtttttcctttgggtcatgaatgatataagcaccgacaagtccggcatagacatttagcctggtgagcgccatggcgtgatcgtgataccacaatatagccccgcgctgctggtttggataatgataaacctctcttttgaaataaggtcctgtttgttcaaagtctttggaaaaccaagcctcgggatacccgtcactgtcatctggcgtgacgccgccgtgtaaatgaacaacagtctttacctcggactcttcatgctggctgtcactgtgatgaatggtgtgatcaatcggaaggaaatgcgtggaaggtaggttattcatccattttacatatacgttttcatttcttttaacctcaatggtcggtcccggaaataagccgttgtagccccacaggcgggtcggagggagatcgcgatggagctgatgggtgcattcctccatggtcacttcgtagtatgttttttcttttgattgctgtactggctttagtgtatctgggattgggagagcatccacaaatttttcaagtgtcattttcatctgtccttatctaaattttccaaattggtactatagttaatgacaataaggacgtgatggttacaaaaaatcttcgtgctgcagactgcccgagaaagaaaataacaaaatcctaaacggcagtccgtttaggatttgatcagcattaaggcaggatatcgggttgctgctgtgtgactgggttggcagccgctttctcgctcaccttgcgttttctgaacacaaggtaagaaatcagaacgattcccgtgatgacgcctgtcagcagcagctcgtctctcatggaatcaataaacgccatggacactaaaattccacaaatggcgatgatggtcaagtaggttaggaaagggaagagccacattttgatcttcaatgcttctgggtttgttttttcgagttttttccgcattttcagctgggaaacagcgatgacaagatagacgagtaaagcgattgcgcctgatgagttgactaagaataaaaagacggtatccggtgaaaaatagttcattacgaccgcgatataagagaaaaatgtgccggccacaatggcttgtacgggaacgccttttttgctcaatttcataaaacggcgcggcgcttcgtttctttctgcaagtgaatacagcattctggatgtggtatacaaacctgaattcaggcaagagagtacggctgtgaggacgataaagttcataatctgtgcggctgcgggcactcctatatgctcaagtacagcgacgaaagggctttctaaaatatttgctgaattccatggcaacagcgccacgacaatggcgattgagcccacgtaaaagacgatgatgcgccatacaacggatctggtggcttttgtcacagattcgatcgggttggatgtttcccctgctgcaatggcaacgatttcagttcccataaaagagaagatgacaacgacaatgccgagcaatacggagctgatgccctccgggaaaaatccgcctttgcctgtaagattcgaaaaaccgactggctcactgcccggtgcaaagccaaaaataaaggcaaaaccaacgattagaaaagcaatgatagtcacaactttaatgagggagaaccaatattcaaactcaccgaaagacttaacggagtagacgtttgtcagggtgagcacaatggtcaagatcaaacttgtcagccacagcggaatatcatggaaccagtattgaataatgccagcaccggcaatggcttcgatcgagatgacgatcacccagaaaaaccagtacagccagccgattgtaaatcctgcccacggtccgatggcgtcgtgagcgtattgagaaaacgatccgctcgtcgggtttacggcagacatctcaccgagcattctcataataaaaatcaccaataatccggctaacgcgtaagaaacaacggcacccggaccggtcgagtgaatcactgaaccgctgcctacaaataggccggctccgattacaccggcaatcgaaatcattgtcatatggcgggtctttaattccttttttaatcctgattgagattggttcataagttacctccttttaaaatgcaatcattactgaatattatgataattgaaactctatcataaatatacagtttgtcgaaaattcatgtgagaaaatataacgttttatttcaaatttgtagtgttttgtttgcgctttcagcgaatgtgtggaaaaaatgtttcgttttttatttgctgtgtgattttgtgtactatttacaattcgatagaatgcgagaagcgctggtgtcattggatctgatgggctttttggcggagcaaataaattggatgagagaaaaagtgttccatcgtcactatttttctgtggcgggtgaatcatgtttctgtagacccactgcggttcagctttgtaagataataataggaaaatgtgagcggggaggaggttttgtatggagagatatgatgaactgaaaaagggagaatccggggcgctggtcagcattgccgcgtatcttgttctttccgcaattaaactgatcatcggttatctttttcactcggaagcacttacggcagacgggttaaataacacaactgacattattgcttctgttgctgtgctgattggcctgcgcatctctcaaaagcctcctgacgaagatcatccatacggccactttcgagcggaaacgattgcatcgcttatcgcatcgtttattatgatggttgtcggcctgcaagtgctgttcagtgccggagaatctattttttctgctaaacaagagacgccggatatgattgcggcttggacggcagcgggcggggcagtcctgatgctgatcgtttatcggtacaataaaaggctggccaaaaaggtgaagagccaggcgctccttgctgcggctgctgataataaatcagacgcattcgtcagtatcggcacatttatcggcattgtggctgctcaattccatcttgcttggattgatacggtcactgcgtttgtgatcggtctgcttatttgcaagaccgcatgggatatttttaaagagtcatctcactctttgacagatggattcgacataaaggacatttccgcttataaacagacaatcgaaaaaatctccggtgtgagccgtttaaaagacataaaagcaagatacttgggcagtacggttcatgttgatgtggtggttgaggtatcggctgatttaaatattacggaaagccacgatatagccaatgaaattgagcggagaatgaaggaggagcatgcgattgattattcgcatgttcatatggagcctttagaacaaaaataatggagcttcctgccacaggaagcttttttgtgtgttttggccagctttattggaaacaatttgctagaatcgtttttttatacagattgctttttgtggtaaagttaggttacattatgatgaattttgtagatgactaggaggaaaagaatggcatatcaagaagacctgcatcctttgctggggaaagcagttgaacatattaatagagtaatggttggaaaacgagacatcgccatactcagcttagcagcccttcttgcaaaagggcatgtgctgcttgaggatgtacccggagtcggaaaaacgatgatggtccgcgcgctggcaaagtcaatcggcgctgatttcaaaagaatccaattcactccggatttgctgccatctgatgtaacaggggtatctatctataatgcgaaaacgatggaatttgaatatcgtcccggcccaattatgggaaatatcgtgctggccgatgaaatcaaccgtacctctccgaagacacagtcggctttgctcgaagcgatggaagagggaagcgtcacggtagatggccatacgatgcagcttgccgctcctttttttgtgatggcaacgcaaaacccggtcgaatatgaagggacctatcctttgccggaagctcagcttgaccgttttttattcaaacttcggatgggttatccgtcctttaatgaagagcttgacgtcttatctcttcaggaaaaaagccatccgattgagacgcttgagccggttattgcaaaagaagacttcatctgtttacagagggaagtgcaaaatgtccgtgctgatgacagcattaaggaatatatcgttgaaattgtgcagaaaacgagacagcatccttctgttcaattaggcgtcagtccgcgcggctcaatcgccctcatgaaagcggcacaggcatacgcgctgctgcatcatcgcgactatgtcataccggatgatattcaatatttagctcctttcacgctgccgcaccggatgatgcttcatcctgaggcaaaatttgaagggattcaggcagaagcgatcgtaagggagatcatgtcagctgtgaaggtgccggttcaaaggtcgtcggtccgctgatgaataagaaatggcaatggctcgtatatggttggaagctgattatattaactttattgacggctgctgttttttcttatgcgatgtttcagggcggctttgtcagctggtttttgttttacgcgtttctcccttttgtcttgtatgccgggctgttggccttgtatccgctccgttcttttcaggcttcaaggcaaatggataaaacacaattgcatgcgggggacaggctgggtgtaacggttacgctgagaagaaagctgccattccccctgatgtatatggtgattgaagattgcctgccagaaggtatcgagtcattaaatcgagacggagccgcggccaaacggctcgtttttccttggtttaaacggagcatgacgatgtcgtatgaattagctcgggtaccgcgcggagagcatcactttcattctgtcagggtgcgaaccggggatgttcttggcttgattgaaaaaacagcattttttgagctggatgataccctgtttgtttatccattctatcagcgtttttcctatcaggtgaatgagaggcatcaggaagacggtgtaagcggttcttctcctattcatcagcaccattcctcagtcgcagcaagtgtgcggaattatcagccgggagaccgatttgctgcgttagattggaagacatctgcacggcggagccagctgatgacgaaggaatttgagccttctcgcagcaaaaatctgtttctgctgatggaccgtttttcctcagacgcattcgaagaggtcgtttcagtgacagcttcgattcttcattctgttttaaaaaacggcgcgggtgctggtctggcttccatcgggaaggaaaaaaacattttccctattcaggaaggggatcagcattttaagcacatgcttcggcatttagccatcgctcattgtgatgcggcagacccgataagccgatatgcacgggaagagctgggaaagccatctgttcgccaagctgatcaagttgttgtcacgggacagttaacggaagatatgctgcacctcgcagaaataggaggcggccgggttacggtgatactggcaaaagagaaagatgctgagctctctcaagctgaaaatgtcatgattgaacgcatgatgaaacgccaaatcagagttcgggtcatgaggggcgggcgagtttcgcgtgttgtttagaaagagaggtgactggttcacatgccgcacgatgatcacaaggggagccgtttgagcttgctgttattttattttctggcttttttattgctgtgggagtggctcaggccgcttgacagttttactgaaacgaaacatacaggcttttttagtgtctttatcggcttgacgtttctgctgacttttttcaggatgaggtggtttgttaccgttcctttttgtgtcttatttacattgatctcgatacacatcctgttttatcaaggatctatattcgacttgagctgggtcagctcttttttgcaggatgtctatctgaatatcacgctgattcaatctgggcaatggaatgacatgattccttcatttcggaccctgctgttttttgtgctgctgtggctgctggtctatctcctgcattattgggtgatttaccagagaagaattttgtttttctttatgatgacagtagcgtatattacgattcttgatacctttacgccatatgatgccacttttgccgtcatccgtatcgtgctgatcggcttctttatgctgggccttttatacttggagcgcattaagctgatggaaagaatcacactgccaaaaacatctgtcctgaaatggtttcttcctttatctgtattggttttggctgcaacgggattcggactcgccgctccaaaatcagatccggcctggcctgatccggtgccttttcttaaaaaaatcactcatcaagaccgcgtgtctgcaggggaaagcaaaatcggatacgggaatcatgatgaatcactcggcggcccgttccagcaggatgctacacctgtttttacatggcagggaaaagagcgtacgtatttccgtgtggaaacgaaggatacgtataccgggaaaggctggattgaaacagacacaggcatgtcgtatcagcttagcaatggaaaagttgaaaatctgtggtttgaccataaggttgcgacagagcgccgcaccgtccgtgtaaaagtcgataagcactacgggtataatcatctgatgtatccgattggtgcggaaaccattcagccaaagcaggctgtctcacttgaaatgaacggcaacacggagcaaatttctccgatcagtgaacaagccggtgaaatcagaaatatgggaaattatactgtaacgtacaattccccggtctataagctggatgaactgagaaaggtaaaagtgagaaaaaacagtgaggagtacacattcagcgatcgctacatgcagcttccagattcactgccagagcgggtgagaacccttgcgatcaaactgactcaggatcacgacaatatgtttgataaggtgaaagcggttgaggactatttagggtcaaatgcgttcacatatgaaacagaaaacgtgaccattccgaagaatgatgaagattatgtcgatcaatttctctttgaaacgaaaatgggttattgtgataacttttcttccgccatggtggtgctcttgcgctcggccgggattccggcccgctgggtaaagggttatacgtccggcgaatacaaagaagcaggaaacaaaaatggcaacatctacgaagtgacaaataacaatgcccattcctgggtagaggtgtatttcccggaacagggctgggttacatttgagccgactaaagggtttacaaatccggctgaatttacttcttctcacacaaaggactccggcaacgataacagcagctcgccgaagaaagcaaaacagaaagaagaggaaaaacagccgcaaaaagaggaaaaacaaaaggaaaagcgggagccagctgtttctaaaaagccgtccgcttcgcatactaatgccggtgcgggcttgtatgcagcgcttgcggttcttgcagtcctcttggtggcagctgtattgctgtatgttttccgctcgttatggattcctgttttcaccgtgaggaaattgaagcggcgcagcgatcagcacgcgttttttgaggcatatgacgcgctgctgaaacaactgaagagaaaagggctgccgaaacgaggcagtgaaacgctgcgtgattatgcaaaacgaatcgatgaaaaatacgacatagaagacatgtcaaagctgacattaagctatgaaagggcgctttacagaaatgaagattcttcagcgctttggaatgattccagagagttatgggaaaatttaattaaaagaagatggtcttgaccgcttatcaacgtgttgttagaattagtgaatattatcggagtctgggagcgagttggcctgactccggcaaacggccttgccaaagagggcggagcgagcttcatatctgtcctcgtttttttctgtgtcaaaaaacttagaggagattaggtgacaaccatgacaaagttagtgaatgaaatgattcttgtccttgatttcggcagtcagtataaccagctgattacacgccgtatccgtgaattcggtgtttacagcgagctgcatccacatacattgacggctgaagaaattaaaaaaatgaatccaaaaggaattattttatccggcggtccaaacagtgtgtatgatgaaaactctttccgctgtgacgagaaaatcttcgagcttgatattcctgttttgggaatttgctacggcatgcagctgatgactcattaccttggcggtaaagttgaagcggcaagccagcgtgaatacggaaaagcaaacatccgcatcgaaggcacacctgatttgttcaaagatcttccaaacgaacaagtggtttggatgagccacggcgatttggttgtagaagttcctgaaggcttcactgttgacgcgacaagccatcactgcccgaactcagcaatgagcaaagcggacaaaaaatggtatggcgttcagttccacccggaagtgcgccactctgaatacggcaatgatcttctgaaaaactttgtattcggtgtttgcgaatgcgaaggcgaatggtcaatggagaactttatcgaaatcgaaatgcaaaaaatccgtgaaacggtcggagacaaacaggttctttgcgcgctaagcggcggcgttgattcctctgttgttgctgttttgattcataaagcgatcggcgaccagctgacttgtatctttgtagaccatggtcttctccgtaaaggcgaagctgagggtgttatgaaaacattcagcgaaggctttaacatgaatgtgattaaagtagacgcaaaagatcgattcttaaacaaactaaaaggcgtttctgatcctgaacaaaaacgcaaaatcatcggtaatgaattcatttacgtgtttgatgatgaagcggacaagctcaaaggcatcgactaccttgcacaaggtacgctttacacagatatcatcgagagcggtacagcaacggcgcaaacgatcaaatctcaccacaatgtcggcggacttcctgaagacatgcagtttgagctgatcgagccgttaaatacgctcttcaaagacgaagtgcgcgcgcttggcacagagctcggcattccggatgaaatcgtatggcgtcagccgttcccaggaccgggactcggaatccgcgttcttggcgaagtaacagaagaaaaacttgaaatcgttcgtgaatcagatgcaatcttgcgtgaagaaattgcaaatcacggcttagagcgtgatatctggcaatacttcactgttcttcctgacatccgcagcgttggtgttatgggtgacgcaagaacatatgattatacaatcggaatccgtgccgttacatcaatagacggcatgacatcagactgggcacgtatcccgtgggatgtgcttgaagtcatttcgacacgtatcgtaaacgaagtgaagcacattaaccgcgtggtgtacgatattacaagtaagccgcctgcgacgattgagtgggaataagtaaataacaatgagaaaaacgtccctttttcaaaaggggcgtttttttgttaactttttgaaaccgtttcgacaatttttgtatctaacaacataggaggtggataaggtgaaggaagacagattgattacaaaggcgagaaaaggaaatgctcgggcctttgaaaagcttatgctggcacatcaggagactttatataaaacagcttatctctatttaagaaataaagaagatgcacttgatgctgtacaggaaacggcttataaagcttttataggtatagaaaaactaaaagagccaaagtactttttaacgtggctcacccgaattcttattaattcaatttttgcaatgaagaaaaagaagggggaattagttccgtttgaaagccatcatgacactggcacggaccaaaggaatattgaagaatatatagacttgcgcaatgcgctggatacacttgatgaacatgttcagttaacaattcagctctattattttcaagattattcgatttcaatgatagctgaacaaacaggaatggcagaaggcacaattaaaacccatttacatagagcgagaaaagcattgaaacaggagctggaaaaggaggatcaaaacaaatggacaaacaccaaatgaagcagatatttgataacattgaagtgccaaagaaagtactcaaaaaggcaatacatcaagctgtcgttcgtgctgaaaatgaaagtaacacaaggcgccgttttaaatgggcacgaactattacaaatggaatggctattgctgctgtggtatgtatattgtatttatcatctggtctttttcttccctctgtaaacaaagcgatggggagcatacccattgtcggacaaatttataaggattttcaagataaagttggtctatcattgtttaaaagcaatttggtcacagctttaaatgaaaaagcagactccaggggaatcactgtttcggtaaacagctcctattacgatgccgggcagcttgtgtataactttactgttgataacctccagtctgatgaaaaagagctcagttataatgtgagtaaagcgagttttaacaataatttttcaatcaactacgattccttaatgctcaaaaaattaaataacaaacaatatgctggtcaattaaggctttatacaaaagggacagaaataaaaaatggggataccgtgccttttgtgattactcatatcaatgaaatacagggaaattggagattcaaactgcctattaccaaaaagaatgcgagttatttagaaagctcaaaagtggtatcagtgcttaacaatcattatcaattttccaatattcaagtggagaacggaaagctcggatctgtccttcaatttacaatcgattatcaaggcgtagcaaagcatgatacggttgaaattaacgaagtcaaagatgatttaggaaacacatatgagatgacagcgtcaaacatccaacttggagaccgcaaaaaagtaaacgagagaacggtaagagcaaaaggacaaacacagttagaatcaccaattaatccaaaggcaaaaaagctaacattaatagcaaatattaaatctgaggcagagggcagtgaaattgtcccgctaaatgcagagatgccgtttcatgtttcagaaacaaaccatcaaaacatagggattgaaatcaataacattaaccaaataggaaagaaagtattggttcattaccatttcactggaattgatacctcaagcgtggacgaaaataaattagtgaatatcggtgaaacgattggccttggtgatataaaaaaaatgcaatcttggcctgatccagtaggtgattatgaagaaggttattatttgaaatggaataaagctgaagtgaagaatatggacacagccgaaatggtatctacttttgaactggatgacgcttatcttgataagctgtctttaaagcattttgagtttaatgaatacggtctgtatattgataaaggcgttttaaatgacctgattcaactaaagccattctcgtttactgtaccagtgcatcaggtgagtcagcctaccgaaaaaaaataatcataagttgaaaagccgtatgttgccatacatacggtttttatcattgttaccaatttagtcaatagacgaataaaccaatttttttaataagtaatgttcgttgtttatattgtcaattcaaaatgaacttggtacaatagacacagaaatcaaataagatgaattcgtataatcgcgggaatatggctcgcaagtctctaccaagctaccgtaaatggcttgactacgtaaacatttctttcgtttgatataaataaaacacgtttatttattcaaactgaaatccgtctgtagtcaagcgtcccaaaattattggggcgttttttatttggcgatttcaggacagaataaatagcaaagagtgaagggagtcaaatagcttgaaaaagtattttcagtttgatgagctgggcaccagctatcgcaatgaaatcattggcggattaacgacttttttatctatggcatatattttgttcgtcaatccgattacgcttgctttggacagcgtgaaagattttccggaggcgctgagaattgaccagggtgcggtctttacggcgacagcgctggcgtctgcagcaggctgtatcttaatgggattaatagcgagatatccgattgccatcgcgccgggtatggggctgaacgcgttttttgcgttttctgttgtccttggtatgggtatttcatggcaggcagctttgtctggtgtttttatttcaggtcttattttcgttgctctttctttaacaggttttcgtgaaaaaatcatcaacgccattccgcctgagctgaaattggcagtcggtgcggggatcggcctgtttattacattcgttggcttacaaggctcaggaatcattactgcaaatccttctacgctcgtcacgatcggaaacattcacagcggtcctgtgctgttaacgattttcggtgtgattgtcacggttattttaatggtgcttcgcgtgaacgcaggcgtgtttatcgggatgctgttaacagcggtagccggcatgattttcggtttggttccggttccgactcaaattatcggcagtgtgccaagccttgcgccgactttcggacaagcgtggattcacctcccggatattttctctgtacaaatgctgatcgttattttaacattcttgtttgtcggattttttgatacagctggtacacttgttgctgtggcaacacaagctggtttaatgaaggaaaacaaattgccgcgtgcgggccgtgcgcttttagctgattcatcttctattgtgatcggtgccgtgcttggtacgtctacaacaacttcttacgtggaatcaagctcaggtgtcgctgcgggtgcccggtcaggatttgccgcaattgtaacagggattctctttttactggctacgtttttctcgccgctcctatcagtcgttacgtcaaatgtaacagcgccggcgcttattattgttggtgcattgatggtggcgccgcttggcaaaatcgcttgggataagttcgaggtggccgttcctgctttccttaccatgatcatgatgccgttaacgtacagcatcgcgactggtattgccatcggatttattttctatccgattacaatggtgtgcaaaggaaaagcaaaagaggttcacccaatcatgtacgggctgtttgtcgtatttatcctgtactttatcttcttaaaataaggaatgaaaaaccagctgcaccggcagctggtttttttgttgcaatagataaaaccatttcatacgatataccgtcatgtagatgtgccgccatgctttacttaaatggaaatgacttgactgttcaggaaggcttcggtaccttatataagtgttttattttcttgctgaatggtattccgccgtatttttttgataggagttgctgacatgacggaagaaagaaaagaaacgtttgaagaagaaattaaccagagtgaaagaatagatgcagatgaagaaccgctatcgagaatgtccagaaaggcgagccggcaaagcaagcagaagcaaaaacaaaaacagaaaccgcgccaggaacgcggtgaatcaactgttaaagtcaagcttgcgtctgtttgggcagccatcaacagatattgcggttttgcgttctcgattttaaaatctccggcgaaaactgtcgtaacggatggtttttctcattataagtacggtctgatttcaatgcttatattcagtatcattttttcaattgggaattggtttcagttaaaggcaagctggaatcggccgctcggtttcggagaacgccatcatgctttctatgacgggtttttagttgttcttgtgtatttgctgatctttttcgcggtaatggtctttgctatatgggctgtctcccgctatatgatgaagcagaaggtgacgttcagagaagcggctgccgtattgggttcattgcttgtaccggtaattgctgtttcaatcctttggctgatctttgcgatcgtaaatattccaatgctgacagtactgtttacggtgctgatcttgttttccatcttttttatcatcgcgctgtatgtacagcgtgtgtaccaggcggcacaagatgcaccaattgattatatctattgtgtatttgcagtggttgcgatagcgctgctgtttacggcagtgacttggccgtttatttctgaatattttacggcgtcgctgattccgctttaatgaaaaaaccggctaatcctagccggtttttttatgtcacactttttacaaatatatctaaaaaacatagttgatttgtaggattaacccgtgtatgatggggaaaatgctgaaaacgtccagcgcaaaaacctttatgtttaaggaggatgatggacatggctgatgtgcttcgccgagcaattaaccaaaagaagcaatttttaaaaaccaaattactgctctcggaattttatcaaggaagaggggaacagcttgcggactacacgctgagtgagcttgagaaagaatacaagtcccttcagaaaatgaaaaaagagatctgacaatagatataaagaggtgagtctgctgaaaagcgggcttttttgttttgattttgaaaaggcgagaaagagggtaaactactactgttcaacgcataaaagcatgtcgaaatattttgcttaagcttacgggcgaagctgattgtaaacggctcatttctctagtagaatatgaatgctttgtgcaagctgaagagtagggggatgaataaaatgatgcaaaccatcttatcaaatgggatagccatggttctcataattctcattattaatattgtctatgtgtcattttttacgataagaatgattttaacgctgaaaggacagcgttatttagcggccggcatcagtacgattgaaatactggtttatgtgacagggctgagtctggtgctcgataacttagatcagattcaaaatgtaatcgcgtacgcgctcggttacggtcttggcgtaattgtcggcatgaaaatagaagaaaaattggcgcttggctatattatggtcaatgtgattacgaaggagctcgatcttgatcttccgaagcagctccgcgaaaaaggctacggcgtgacaaattgggtggcaggcgggcttgaaggcgaccgcacagcccttcagatcctgacgccgagaagatatgaactccagctatatgatacgattaaaacacttgattcaaaagcctttattattgcgtacgaaccaaaaacaatccacggcggcttctgggtcaaagcggtgaagaagaggagaattaaagaataatggcaaagccgaagaagaaaaagtttgaagtgacagagcagcaaacgattgatgcggtgcttcagcaaatgaaagaagaaggatatctgcctgtaaggcgaatggaagagcctatttttatggaaaaaaaggaaaatgggtcaattcagatcgttccgtgcgggaaaaaaatcgtatttgaagggaaattgatctaaaacacgaacattagtagaaagaatttttgtatcgttcgataatatcgttgacattatccatgtccgttgttaagataaacatgaaatcaaaacacgacctcatataatcttgggaatatggcccataagtttctacccggcaaccgtaaattgccggactatgcaggaaagtgatcgataaaactgacatggatatatcgcagaagcgaacgactgacgatacatgtaccatgcccggtttgtattgcttcctcataagtgcaatgcagagcgggtattttttattttctgaaaacaaaagcattagaaggtggggaacagaatgcagccgctagtaggaatcatcatgggaagcacttccgattgggagacaatgaaacacgcatgcgacatacttgacgaactcaatgttccgtacgaaaaaaaggtcgtttccgctcaccggacgcctgatttcatgtttgaatatgctgaaactgctagagaaagaggcatcaaggtgattattgccggtgccggaggagcggcgcatctgccagggatgacggctgcgaaaacaacactgccagtcattggagttccggttcagtctaaggcgctgaacggaatggattcacttctttccatcgtccaaatgcctggaggcgtgcctgttgcgacaacatccatcggcaaagcgggtgctgtgaacgcaggcctgttagcggcgcaaattttgtcagcatttgacgaagaccttgcccgtaagctggatgagagaagagaaaatacaaaacagacagtgttagaaagcagtgatcggcttgtctaaacaaatcatctatccgggagctgtaatcggcattatcggcggcggccagcttgggaaaatgatggctgtgtccgccaaacaaatggggtataaagtcgcggtcgttgatccggtgaaagattcgccgtgcgggcaggttgcggatatcgaaattaccgctcattataatgaccgtgaagcgattcgaaaattggctgaaatcagcgatatcatcacatatgagtttgaaaacatcgactatgatgcgctgcattggctgaaagatcatgcgtatctcccgcaaggaagtgagctgctgctcattacccaaaaccgtgaaacagagaaaaaagcaattcaatccgcgggctgtgaagtcgcaccgtacagcatcgtcaaaacaaagaatgaattgaaacaggcggtacaggagctcgggttacccgcagttctgaagacatgccgcggcgggtacgacggcaaaggccaatttgtgataaaagaagaggcgcaaatggagcaggcagccggtctgttagaacacggaacttgcattcttgaaagctgggtttcttttgaaatggaactgtcggtgatcgtcgtcagatcggtaaacggtgaaatttcaacatttccgacagctgaaaacattcaccacaacaatattcttttccaaagcatcgtgcccgcacgggtagagaaagggattcagcagaaggctgctgatctcgcagttaagcttgcagatgagcttaaccttgtcggaccgcttgctgttgagatgttcctgacagaggacggagagcttttggtcaatgaactggcgccaagaccgcacaattctgggcattatacgctggacctttgcgagacgagccagtttgagcagcatatcagagcggtatgcgggcttccgcttgggaagacagatttgctgaagccgggcatgatggtgaatcttctcggcgatgaagtgaagcttgtggaggaagacccggagcttttaaaagaggcaaagctatatatatacgggaaacatgaaatcaaaaaaggccgcaaaatggggcatattacatttatgaagcagcctgaagacgaatggattcaggagatcacaaataaatggatgaatagagacggaggacaagcagaatgatcgaacgttattcaagacctgaaatgtccgcgatttggacggatgaaaacagatttcaagcatggctggaggtagagattcttgcctgtgaagcgtgggcggagcttggcgtcattccgaaagaagatgtaaagattatgcgcgaaaacgcgtcatttgacatcaaccgcattttagaaattgaaaaggacacgcgccatgacgttgtcgcttttacacgcgctgtttccgaatcattgggcgaagaaagaaagtgggtgcactacggattaacgtcaactgacgttgttgatacggctctttcctacttattaaaacaggcaaacgatattttgctcaaggatcttgagagatttgttgacattataaaagaaaaagcgaaagaacataaatacacagtcatgatggggcgcacgcacggcgtacatgctgagcctacaactttcggcttaaaacttgcgctttggcatgaagaaatgaaacgtaatcttgagcgcttcaaacaagcgaaagcaggcatcgaggttggaaagatttctggcgctgtcggcacatatgcgaacattgatccatttgttgaacaatatgtctgtgagaagctcggattgaaagcagcaccgatttcaactcaaacccttcaacgtgaccgccatgctgactatatggcaacacttgctttgatcgcgacaagcattgagaaattcgctgtggaaatccgcggactgcaaaagagtgaaacacgtgaagtagaggaatttttcgcgaaagggcaaaagggttcatctgcaatgccgcataaacgaaatccgattggctctgaaaacatgacaggcatggcgcgcgtgatccgcggctacatgatgacagcttacgaaaatgttccattatggcatgagcgcgatatttctcattcttcagcagaacgaattattcttccggatgcgacaattgcgctgaactacatgctgaaccgcttctccaacatcgtgaagaacttaacggtcttcccggaaaacatgaagcgcaacatggaccgcactctcggccttatctattctcagcgtgtgctgcttgctttgattgacacaggccttacacgtgaagaagcctatgatactgttcagccgaaagcaatggaagcgtgggaaaaacaagtgccgttccgcgagcttgttgaagcggaagagaaaatcacgtcacgtctttctccagaaaaaattgctgactgctttgattacaattaccatctgaaaaatgttgatctgatctttgaacgtttaggtttagcatagaagaagcttttagcggcttcttctaagccgccgatgtttgaaaattcccaacattcgggttaggaggccttccgtgaatattgtgaagaatgaacttttatacgaaggaaaagcaaaaaagatctacaaaaccgatgacgaaaacacgctgtatgtcgtgtataaagactccgccactgcctttaacggcgagaaaaaagcagaaatcagcggaaaaggacgcttaaataacgagatttcaagcttgattttcaaacatcttcatacaaagggcattaacaatcactttatcgagcgcatttcggaaacggaacagctcattaaaaaggtaacgattgtgccgcttgaagtcgtggtcagaaatgttgtggcaggaagcatgtccaaacgtctcggcattccagaaggcacggagcttgagcagccgattatcgagttttactacaaggatgacgcgctgggtgatccgctcatcacagaagatcatatttggcttttgaaagcggcgactcctgagcaggtagaaaccattaagtccattacaaaaacagtaaatgaagagcttcaaagcattttcgacgattgtcatgtcagattaatagatttcaagcttgaattcggtttagatgcagaagggcaagtgcttttggcggatgaaatttctcctgacacatgccgcttgtgggataaagacacgaacgaaaagctggataaagatttattcagacgcaatctgggaagcttaaccgacgcatacgaagagattttcaaaagactgggaggcattcatcatgtataaagtaaaagtttatgtcagcttaaaagaaagtgtactagatccacaagggagcgctgtccagcatgccttgcacagtatgacttacaacgaagttcaagatgtgcgcatcgggaaatacatggagcttaccattgaaaaatctgaccgtgatcttgacgtgctagtgaaagaaatgtgcgaaaaacttcttgcgaacacagtgattgaagattacagatatgaggttgaggaggtagtcgcacagtgaaatttgcggtgattgtgttacccggctccaactgtgatatcgatatgtatcatgctgtaaaggatgagctcggccatgaagtggaatacgtctggcatgaggaaacaagtcttgacggcttcgacggtgtgttaattccgggagggttttcttacggcgattacttaagatgcggcgccatcgcccgatttgcgaatattatgccagctgtcaaacaagcagcggctgaaggaaaacctgttcttggcgtctgcaacggattccagattttacaggagcttgggctgctgccaggcgcaatgagacgcaacaaagatctgaagttcatttgtcgtccggttgaattaattgttcagaacgacgaaacattattcacagcttcctacgaaaagggagaatcgattacaatcccggttgcccacggtgaaggaaatttctattgtgatgacgagacgcttgcttcattaaaggaaaacaatcaaattgctttcacatacggctctaatattaatggaagtgtcagcgacattgccggtgtcgtgaatgagaaaggcaatgtattaggcatgatgcctcaccctgagcgcgcggtcgatgaactgcttggaagcgccgacggtcttaaattgttccagtctatcgtgaaaaattggagggaaactcatgtcactactgcttgaaccaagtaaagaacaaataaaagaagagaaactgtatcagcaaatgggtgtcagtgatgatgagtttgcattgatagaatccattcttggaagattgccgaactacacagaaatcggaattttttctgtcatgtggtctgagcattgcagctataaaaactcaaagccgattctgcgtaaattcccgacaagcggcgagcgtgtgctgcaggggccgggggaaggcgccggaatcgttgatatcggtgataaccaagcggttgtgttcaaaattgaatcacataaccacccatcagctctcgagccttaccaaggcgctgcgactggcgtaggcggaattatccgtgacgtattttcaatgggtgcccgtccaatcgctgtattgaactctcttcgatttggtgaactgacttcaccccgcgtgaagtacttgtttgaagaagtagtagcgggtatcgccggatacggcaactgtatcggcatcccgacagtcggcggagaggtacaatttgacagcagctatgaaggaaatccgcttgtcaatgccatgtgcgtcggtttaatcaatcatgaagacatcaaaaaaggccaggcgaagggtgtcggcaataccgtaatgtacgtaggagcgaaaaccgggcgtgacggaatccacggcgctacgtttgcttctgaagagatgtcagactcatctgaagaaaagcgttctgctgtccaagtcggcgatccgtttatggagaagcttttgcttgaagcgtgtctggaagtcatccaatgcgacgccttagtcggcattcaggatatgggagctgccggtttaacaagctcaagtgcagaaatggcaagtaaagccggttctggtattgaaatgaaccttgacctgattcctcagcgcgaaacaggcatgagcgcgtatgaaatgatgctttctgaatcacaggaacggatgcttttggttattgagcgcggacgtgagcaggaaatcatcgatatttttgacaagtacgatcttgaagcggtttctgtcggacgtgtgacagatgataaaatgcttcgcctgacacacaaaggagaggttgtgtgcgagctgcctgttgatgccttggcagaagaagcaccggtttaccataagccttctcaagagcctgcttactatcgcgagtttttggaaacggacgttccggctccgcaaattgaagatgcgaatgaaacgctgaaggcccttcttcagcagccgacgatcgcgagtaaagagtgggtgtatgatcagtatgactacatggtgcgcacgaatacagttgtcgctcctgggtctgatgctggtgttctcagaatccgcggaacgaaaaaggcgctggcgatgacgacagactgtaacgcgcgttatctctatcttgatcctgaagtcggagggaaaattgctgtcgctgaagcagcgcgcaacatcatttgctcaggcgcagaaccgcttgcggtcacagataaccttaacttcggaaacccggagaagccggaaatcttctggcagatcgaaaaagcggcagacggcataagcgaagcgtgcaatgttctcagcacaccggttatcggcggtaacgtatcgctttataacgaatcaaacggcacggcgatctatccgacaccagttatcggcatggtcggcctaattgaagatacagcgcacattacaacacagcatttcaaacaagcaggagatctcgtatacgtgatcggcgaaacaaaaccagagtttgcgggaagcgagctgcaaaaaatgacagaaggccgtatttacggcaaagcgccgcaaatcgatcttgatgtagagctgtctcgtcaaaaagcactgcttgacgcgattaaaaaaggcttcgttcaatctgcgcatgatgtgtctgaaggcggcttaggcgtagcgattgcggaaagtgtcatgacgacggaaaaccttggcgctaatgtgactgtagaagggggagcggcattattattctctgaatctcaatcccgcttcgtcgtttcagtgaaaaaagaacaccaagaagcgtttgaagcaactgtcaaagatgcggttcatattggtgaggtaacagctgacggaattctggcgattcaaaaccaagacggacaacaaatgattcatgcgcaaacgaaagagcttgaacgcgtatggaaaggagctatcccatgcttgctgaaatcaaaggcttaaatgaagaatgcggcgtttttgggatttggggacatgaagaagccccgcagatcacgtattacggtctccacagccttcagcaccgaggacaggagggtgctggcatcgtagcgactgacggtgaaaagctgacggctcacaaaggccaagggctgatcactgaagtatttcaaaacggcgaactcagcaaagtaaagggaaaaggcgctatcgggcacgttcggtacgcaacggctggaggcggcggatacgaaaatgttcagccgctcctcttccgttcccaaaacaacggcagcctggcgcttgctcataacggaaatcttgtcaatgccactcagctgaagcagcagcttgaaaatcaagggagcatctttcaaacctcttcggatacagaggttttggctcacctgatcaaaagaagcggacacttcacgctgaaggatcaaattaaaaactcgctttctatgctgaaaggcgcctacgcgttcctgatcatgaccgaaacagaaatgattgtcgcacttgatccaaacgggctgagaccgctatccatcggcatgatgggcgacgcttatgtggtcgcatcagaaacatgcgcatttgacgtcgtcggcgcaacgtaccttcgcgaggtagagccgggagaaatgctgatcattaatgatgaaggcatgaaatcagagcgtttttccatgaatatcaaccgttccatttgcagcatggagtacatttatttctccagaccagacagcaatattgacggtattaacgtacacagtgcccgtaaaaaccttggaaaaatgctggctcaggaatccgcagttgaagctgacgtcgtaaccggggttccggattccagtatttcagcggcgatcggctatgcagaggcaacaggcattccgtatgagctcggtttaatcaaaaaccgctatgtcggcagaacgtttattcagccgtcccaggctctgcgtgagcaaggcgtcagaatgaagctgtctgcggtgcgcggggttgtagaaggcaaacgcgtcgtgatggtggatgactctatcgtacgcggaacaactagccgccggattgtcacgatgcttagagaagcgggtgcgacagaggtgcatgtgaaaatcagttcaccgccgatcgctcatccgtgcttttacggcattgatacttccacacatgaagaattaatcgcgtcttcgcattctgttgaagaaatccgtcaggaaatcggagccgataccctctcatttttgagtgtggaagggctgctgaaaggcatcggcagaaaatacgatgactcgaattgcggacagtgtctcgcttgctttacaggaaaatatccgactgaaatttaccaggatacagtgcttcctcacgtaaaagaagcagtattaaccaaataaaacttgaaaaatgacataaaggcagcgcagttcggctgcctttctctttctgccctcattcggggagatattttgaaaagcgccttaaaggagtgaataggatgtctgaagcatataaaaacgcaggagttgacatcgaagccggatatgaagctgtaaaacgaatgaaaaaacacgtggagcgcacgaaacggcttggcgttatgggcagccttggcggttttggcggcatgtttgacctgtctgagctttcttatcaaaaaccagttctcatttcgggaacggacggtgtcggcacaaaattaaagctcgctttttccatggataagcatgacacgattggcgtggacgctgttgcaatgtgtgtcaatgacgtgctggcacaaggtgcagagccgctgtttttcctcgattatttagcggttggcaaagcggacccagtgaaaattgaacagattgtacaaggtgttgcggaaggctgtgagcagtcaggttcagccttagtcggcggtgaaacggctgaaatgccggggctctatacagctgatgaatacgatattgccggtttctcagtcggagtggcagaaaaggacgaaatcgtgactggagaaaacattgaagagggccatctgttgatcggtctcagctccagcggccttcacagcaacggcttttcccttgtcagaaaagtgcttctggatgatgcggagctggacctcgatacaacatatgagccgtttgaacgcccgcttggcgaggaattgcttgaaccgacaaggatttacgtgaagcctgtgcttgccgcggtcaaaagcggaaaaatcgacggcatggcgcacgtgacaggcggaggatttattgaaaatattccgcgtatgcttccggaaggcttaagtgcggaaattgatcatggctcatggccgatcccgccaattttttctttcttgcaagagtacggcaagctaaaggaagaagacatgttcaacgtctttaatatgggtatcggttttgttttggcagtcaaagaagagcatctgacagatgtgatcggaacgcttgaaagccatggcgaaaaagcctatttaattgggcgtgtgaaaaaaggtgaaggcgtcacattcggcggtgcggcactttcatgaaaaagtttgcggtatttgcatcaggaaacggttcaaacttcgaagccatcgtcacgcgtttgaaggaggagaactgggatgcgtcagcagcgctcctcgtttgcgacaaaccgcaggcgaaagtcatcgaacgggcggaagcattccacattccatccttcgcatttgagccgaagtcttatgaaaacaaggctgcatttgaacaagccatcattgaacagcttcgtcttcacgaggttgaattgattgttcttgccggctatatgaggctgatcggtgatacgctccttcaagcatatggaggaaaaatcattaacattcacccgtcgcttcttccggcgtttcctggaatcgacgcagtcggacaggcgttccgggcgggtgtaaaggtggccggaatcaccgtgcattatgtcgatgaaggaatggatacaggtccgatcatcgctcaaaaggctatcgaaattgatgagcatgatacattggaaacaatcgaacagcggattcacaagcttgagcataaatggtatccgagtgtgattaaacagctattaggattaaataacagaggtgaaaaggcatgaccattaaacgtgcattaatcagtgtttcagataaaacaaatctcgttcctttcgtaaaagaactgacagagcttggcgttgaagtcatctccacaggcggaacgaaaaagcttcttcaagaaaacggtgtggatgtgatcggaatttctgaagtgacaggctttcctgaaattatggacggccggttaaaaaccctacacccgaatattcacggcggccttctggcggttcgcggcaatgaagagcatatggcgcagatcaatgaacacgggattcagccgattgacctcgttgtcgtcaacctctatccatttaaagaaacgatttctaaggaagacgtcacatatgaagaagcgatcgaaaatatcgacatcggcggacctggcatgctgcgtgcggcatcaaagaaccatcaggatgtcacggttatcgtcgatccggccgattacagcccagtgctgaatcaaatcaaagaagaaggcagcgtatctcttcagaaaaaacgcgagctcgcggcaaaggtattccgtcatactgcggcatatgatgcactgatcgctgactatctgacaaatgttgtcggtgaaaaagaaccagagcaattcactgtgacatttgagaaaaaacaatcgcttcgctatggagaaaacccgcatcaggaagcaactttctatcaaacagctcttcctgtcaaaggctccattgcgcaagcagaacagcttcacggaaaagagctttcttacaacaacattaaagacgcggatgctgcagttcaaatcgttcgtgaattcactgaaccggctgctgttgctgtgaagcatatgaacccgtgcggcgtgggaacaggaaaaacgatcgcagaagcgtttgacagagcgtttgaagcggataaaacatctatcttcggcggcattatcgcgctgaaccgtgaagtggacaaggcaactgccgaagcgcttcacaacattttcttagaaatcatcattgcgccttcattcagccaagaagcgctcgacgtcctgactgcgaagaaaaatctccgtctgctgacgcttgacgtatccgccgctgttcaaaaggaaaaacagctgacatccgttcaaggcgggctgctgattcaagatttagatatgcacggcttcgatgatgctgagattagcattccgacaaaaagagagccgaacgagcaagagtgggaagacttgaagcttgcttggaaagtcgtgaagcatgtgaaatcaaatgcgattgttctcgcgaaggacaacatgacagtcggcgtgggagcaggccaaatgaaccgcgtcggatcggcaaaaatcgcaatcgagcaagcaggggaaaaagcgaagggcagcgcgctcggttcggatgcatatttcccaatgccagatactgtcgaagaagcggcaaaagcgggcgttacagccatcattcagccaggcggatcgatccgagatgaggattccatcaaaaaagcggatgaatacggcattgccatggtattcaccggcatcagacacttcaaacattaaggggatgaaaacgacgtgaatgtattaattatcggtaaaggcggaagagaacatacgctggcgtggaaggcagcgcaaagcagcctcgtcgagaatgtatttgcagctcctggaaatgacggcatggaagcttccgcacagcttgtaaacattgaggaaagcgaccacgcagggcttgtctcgtttgcaaaagaaaaccaggtcggcctaaccattgtcggccctgaggttcctttgattgaaggtctggtggatgaatttgaaaaagcgggtctgcgcgtgttcggcccgtcaaaagccgcggcgatcatcgaaggaagcaaacagttcgctaaggatttaatgaagaaatacgacattccgaccgcagaatacgacacgtttacatcctttgatgaggcgaaggcatatgtgcaggaaaaaggtgctccgattgtgataaaagcagatggacttgcagctggaaaaggcgttactgtggctatgacagaggaagaagcaattgcatgtctgcatgactttcttgaagatgaaaagttcggtgatgcgagcgcgtccgttgtcattgaagaatatctttctggtgaagaattttctctgatggcctttgtcaaaggggaaaaggtgtatccgatggtgattgcccaggatcacaagcgtgcgtttgacggagacaaaggtccgaatacaggcggaatgggcgcttactctccagttccgcaaatttcggaagaaacggttcgccatgctgtagaaaccatcgtgaagccggccgcaaaagcaatggtacaagaaggccgttccttcactggcgttttgtacgctggattgatgcttactgaaaacggctcgaaggtcattgaatttaatgcccgtttcggcgatccggaaacacaggtcgtgcttccgcgcatggaatctgatctggtacaggtgcttcttgatcttttagatgataaggaagttgacttaagatggaaggataccgcggcagtgagtgttgtgcttgcatcagaagggtatccggaaagctatgcaaaaggcacgccgatcggcagccttgcagcagaaactgagcaggtcgtggtcttccatgccggaacgaaagcagaagatggagagttcgttacaaacggggggcgcgtcgccaatgtgacggcttttgatgaaacgtttgaagcggctagagaccgagtgtacaaagcggttgatgaaatattcaaaccgggactctttttcagaaaagacattggggcacgcgctttaaaggctgcccaaaaataagtgaggaaaacccgcagaatagctgcgggttttttgttatcaaaaagcgggatggcagctggaagaagaaaggacaacgagcgtggttggttttccatgggccatcgaggcgtcaataaaatcctcaagcgtatgtaccgattcagtcacgacctttgtcacatagctgtacatccctgtgatgcggtggttttctgctacatcagggtgcgcttttgcaaaggcggcgtagtgcttgcagcttttcggctccatgagaatgaaagcggtgacatgcttgtttagtttttcataacagatattcgcgctgtacccggtaatcactcctttgtcttcaagcttcctgacacgctccgccgcgcttggcgaactgagtccgacaagctttcccagctcaaccatcgttaatctgccgtttcgctgcaaatgcgagagaatctgaaggtctgtatcgtccatttgtccggctcctttacatatttaggcgaatgaatgaaaattcctttgatcgtaaggtaatgctgttgatttaacttcattgtagcatatggatgccgtcttattttttctataataaagccatcaatcagagaggaggcatcatgttgccagaattacagcgctctattacttggatacaagggacggcgttaacgattggggcggttttaggatgcgggatattaatcctgccgtctgtcactgcggatacggccggtccggcttctttatttgtctgggtattcatgtcttttttatcttttcttctcgtcggcacgctggcacggcttgtgaaaattgcgcccagcgcgggaggaatcactgcttatgtgcagctggcctttcagaaaaaagccggggctattttgggctggatcatgttaggttccgttccgattggcgttcccatcatcgctttgactggcgcgcattacgtcagttacatcacagaggcggccgattggcagattacattgattgctggttgcatgctggctatatctattttgcttcatatgagaggcattcaactatcagcaaacatcagtacaatcgttatttgtgtcatcgtatttctgcttgtcacttctattgctgtgtcattgccacacgtcacgatagcagaattcaagccgtttcttccgcatggctggtctgccgctggatctgtttcagttatgatttttttctcttttgtaggctgggaaatgattaccccgttggctgaggaatttcatcgccctgaaaaagatgtcccgctcagcttgtttttggcagcgtcttgtgtggcagggctgtatatcatgctgtcatttgtgacggtggggactcattcatatggagagaatggagaaattgcatcgcttgccatgctcatttcaaaaggagcaggggaaagcggtgtatacgtcacggtatgtttagcgctgtttattacattcgctaccatccatgccaatattgctggtttttcaagaatggtgtacgcattggcgagagaggggcacatacccgtattttttggaaaactcagtgcgacaaaacgtacgcctatccgtgttttgacagcgatggccgcagtgtttggcttagtgcttgcggcgcatggtctgtttcaaatcgatttgacgactctgttgaaagggccgagcgcggcttttatcgcatcttacatatgtacaatggcggcagcactgaaactgctgggcaggagagatataggctggtggatggcgctcggggcatttgcggcgtgcgcggtgatttattcattcagcggctgggcactgctttatccggcagtgctggcagctgcaggatatttctatatgaaaacaaaggatgggcataaaaaaaagcttgatcacgttttgtgattaagcttttccatttatccgttttgatgctcgttatttccagaatcactgtgttgaaacatgtaggtcacaggacagaagcgcaagattcccgaacccgctttcatggcccccataaagatgtaaaagagatgcattctgcaccaaggttttttcgtaaactttgcactggcggctgacataatcgtcaatccgcaggcgattctgaacacggcattgatgagactgatgtttggcttcaaggaaatccgctccttttacttaaaaaagttttttaaccgaaccttcaaaaatttgtaacgtttttatcgtgcgtgatgaggaaggatgtgataccatgagtctaatacatgtaaaggagagtatgtgaatgtccgaacgcacctttaactggaaaaacaaagacatcagggcacaggttgatgttgtagactcaaagctgcttccaacgctccttttacggaatgctctcgtcttaaatccatatgtaaaacaatggctgaaaaaaaacatttggatttatcaggaccgcattgtttatgtgggtcatgaacttccgaatagagccgaagaaattcatacgattgattgtgaaggaaaatacattgtgccaggttatattgaaccgcacgcacatccttttcaaatatataatccccaaacactggcggaatatgtgtctcaatacggaacaacaacattcgtgaatgataacttatttttgcttttgcaaagcggaaaaaagaaagcgcttacgattttgaatgaactcaaaaagcagcctgtccagtatttttggtggtcacgctatgacctccagaccgaggttctgaacgaggaccacgtccttccatttgacgtcagaaaacagtggattgaacatccggatgtgattcaaggcggagaaatgaccggatggcctcgcctggtagatggtgatgatttaatgctccactgcatgcaagctacaaagaaacagagaaaacgcattgaagggcattttcccggcgcttctgataaaacgcttacaaaaatgaagctgttcggtgcagattgtgatcatgaagcgatgtcaggtgatgaagtgatgagaaggctggaactgggctattatgtttcccttcggaactcttccattcgccctgatgtaagaaaaatcttgcaagagctgcatgagaagggcttccgctattatgaccacttcttttacacgacagatggcgcaaccccgaatttctataaaggcggcatgacaaacgagctgattcgcatcgcgttagaagaaggcgtacctgcaatcgacgcctacaatatggcatcatttaatatcgcaaagtattaccaaatggatgattatttaggagttgtcggaccgggtagactggcatcgctcaacatactggaagatccgttaaatccgaatcccgtgactgttctgtcaaaagggactattctgcgtgaagacggctgtgatttgaaggcgtttacaaaggcggactggcacaaaggtggtcttgtcccgcttgagctttcatatgatatgacgatggatgacttgcagttttctatgccgatgggcgtgaaaatgcggaatgcggttattatggagccgtatatgattgagattgacaattcgatggaacagctctcgtttgaccatgatgaaagttatttgacgatgctcgacagacacgggaaatggcgcgtcaatacgatgataaaagggtttgcctcaagcgtgcagggatttgtaagctcctttacgacgacgggcgacattgtcgcgattggaaaaaataaagcggatatgctgctcgctttcgcccggatgaaagaaatcggaggaggaattgttttagcggagaacggaaacattttgcatgaaatcccgcttgccctgtgcggctgcgcctcttcggaagcgtatgaagaagtgcttgagaaggaacaaaagctgagagatcttttgactgaaagaggctatgagttttgcgatcctatctatacgctgctctttttgcaaagtacgcaccttccgtatatacgcattacgccaagaggaatcttcgacgtcatgaaaaaaactgtactctttccatcgataatgcgttaaaatataaaagagcagggagccgacatatgaaaaaatggatgacagtttgcgcgctgtgtttcgtgttttttctgctggtatcctgccagcagaaggatgctgtcccggatactgcaaagaagctgaaagctcctttaacggggctaaagactgaacagaaagtgactgaacgccgccctgttgctgttgtggtgaacaatcacccgaaggcgaggccgcagtcgggtctgtctaaagccgacattgtcatagaagcgctagccgaagggcaaatcacaagatttctggccattttccaaagccagatgcctgaaactgtcggacctgtgcggagcgcgcgggaatatttcgtcactctcagcaatggctttgacagcatatttgtccatcacggctggagtcccggcgccaaaaagcagctggaatccggagctgccgattatatgaacggattggattttgacggaagcttattttggagagctgatttcagcaaaccgccccacaattcctatacgtcttatgattacataaaaaaggcggcagaacaaaagggttataagctgaagcaggaaacaaatccgctgctgtttcaaacatcagatgcaaaacctgcaaatgaatcttacaatgttcgggtagattatggaacaaaaaacgttacaaatcttgtcgaatacaactatgataaaaaagctgaatcttatacaagaagctctgatggtgtcataacgacagaccgggaaaccggaaagccggttgcaatgcaaaatattttcattgttgaagccagccatcatattattgatcaagatggaaggcgggacatcgacttggtatcaggaggaaaaggtctgttgtttcagcacggaaacgtcattgaaacagactggaaacaagtgaatggcagaattgtgccgataaaagacggcaagtggcttccgtttgtgccaggaaagacttggatcaatatcgtacctgatcttgatgcggcttccattagtaaaggagaaggtgtgtaacgatgcaaatcgataaattacgcggcaaagagctggaccagttatttaactcgatcttatcgctgaaagacctggaggaatgttaccgattcttcgatgatctatgcacaattaacgaaattcaatcgctggctcagcgccttgaagtggcgcgcatgcttcgcgaaggaaacacgtatcataagattgaaacagaaacaggcgcttccacggctacgatttcccgtgtgaaacgctgcttaaattacgggaatgacgcttatgaaatggcgcttgaccgtgtgaaggagacggaaactgagtcttcttcaaaataataaacaaccgccctgccgttcggcaagggcggtttctttatgaaacaaattgatggatcaggttgtcgatatcgatgatactgccatcctctttccgatagacaacatgctccttggaaaagtgaatcggcgaattgatccctgctgcggctgcaaggttaaatagtccctcgcgcaatgaaataacgtagttgcagacacgatgctgtttttcctcaacgctcagtgctttttgcaatttcggatctgtcgtcgccacacctgccggacatttgttggtgtggcagacgagagcgcggatgcagccaacggaaaacatcatgccgcgtgcgatgttgacaaagtcagcgccgagggctaaggcgaccgcgattttatcaggagtcaggagctttccggaagcaaagattttcagctggctgcgcaagccgtactgtttaagaagcgtgtcaacaataggcagcgctgtcataatcggaaggccgactgtatccgcgagctcgtaaaaggaagctccggtaccgccttcacttccatcgatcgtgataaaatccggatgttttccgcttttctgcatatgagagaaaagctcatgcaattcttcaggatgccctgcgaccagtttgatgccgactggcttttgtccgacatctctaagtttttcaataaagtcgagcatttcaggagggtttgagaattcataaaagcggttcgggctgtcaatcgactttccaggttcgacattccgaatgtctgccacttcctctgatactttggcgccatccacatggccgccccgggttttcgctccttgtgccagctttagctcaaacgctttaatctggtcaatcctgctttttcttttaaattcctcccacgaaaattccccgtttcttttgcgcacgccgaataggcccggtccgatttggcaaatgatatcggcgccgccctttaagtgatattcagacaatcccccttcacctgtattcatccaggtgccgcctgcctgatggagcccttttgagagcgccgtaacagcccgttctccaagagaaccgtagctcatggcagactggccgactaagcccttcacataaaatggcttctcgcatgtacgctcgccaatcacctgtacatcatcaggatggagaaaatacgggtctgccttgatatgttcggcatgctccttgcgtttgaacagattgtcagcatccattttatagatttgggtttcaattttgggcgtttgatttacgtgcatttcttccctttgttttggaaacatagcgttacggatataatagccaggtttatcaaaatctcttacagatccaaagcccatcattctgcttttgtatttgccggagatgacggtttgctcatattcctttcgtgaaaaaggctgctcctcattgtcattgctgtataaatactgtctgagctccggcccgattttttcaaggatataccgaaaccttccgatgacgggatagttgcgaagaattgagtgctcctgctgtttttcatcctttatgtagatccaggcaaacaagacgatcgggatagcgatgatccctatgataaatgcgatgagtgctattatgatggtttccatctctcagcctccctttttatgtaaccatttccacagttgaacactttccaaacaatagcagaaggaatctggtgaaaaatgtgtgcttctgccgatacaggactcagagagcaggtactgccatatgctctttttttatgaaaatagaatcaaaacacctttttcagtgaataacgagattaacggctttttccgtttttccgcgctatgtgaatttgttataatgtttaaatggtaacaaacgaatggaggaacgtatgacgtgtacgatgtaacggagtggaagcatgtctttaaactcgatccaaataaagatttgcctgacgaacagctggagattctttgcgaatcaggaacggatgcggtcattatcggaggcagtgatggtgtaacagaggataatgtcctgcggatgatgtctaaggtaagacggtttttggtgccgtgtgtccttgaggtatcagcgattgaagcgatcgttcccggctttgacttatattttattccgagtgtattaaacagcaaaaacgcggattggattgtcggaatgcaccagaaagccatgaaggaatacggagaactgatgtctatggaagaaatcgtggcggagggctactgcatcgcaaatccagattgcaaagccgcggcactgactgaagcggacgccgatctgaatatggatgatattgtcgcctatgcgcgtgtgtcggagctgctgcaactgccgattttttatttagaatacagcggcatgcttggagacatagaagctgtcaagaaaacgaaggctgtattggaaacgtcaaccttgttttatgggggcggcatcaaggatgcggaaacggccaagcagtacgcagagcatgcggacgtgatcgttgtaggcaatgctgtgtatgaagattttgacagggctttgaaaacagtagcggctgtgaaaggcgagtagtaaattgtacggatttggtttatgatagaacatatgttttgtataggcgggtgaacaaattttgaattatattagcaatcaattactaagcggtttaaaccccgttcagcaggaagcagtcaaaacaacggacgggcctcttttgctgatggcgggagcgggaagcggaaagacgcgtgtcctgacccatagaattgcttatttaatggcggaaaagcatgtggcgccgtggaacattctggcgatcacatttacaaataaagcggcacgcgaaatgaaagaacgtgtggaaagcatcctcggacccggcgcggacgatatctggatttccacattccacagcatgtgcgtgcggatcttgcgcagagatatcgaccggattgggatcaaccgaaatttctccatccttgatacggctgaccagctttcagtgatcaaggggattttgaaggagcgcaatcttgatccgaagaagtttgacccgagaagcatcctcggtacgatcagcagtgcgaaaaacgaattgaccgaaccggaggaattctctaaagttgctggcggctactacgatcaggtggtcagcgatgtatatgctgattatcagaagaagctattgaaaaaccagtcgctcgatttcgacgatttgattatgacgacgattaaactgtttgaccgagtgccggaagtacttgaattttatcagcgcaaattccaatacatccatgttgatgagtatcaggatacgaacagggcgcaatacatgcttgttaagcagcttgccgagcgtttccagaacctttgcgttgtgggggattctgatcagtcaatctacagatggcgcggcgcggatatcaccaacatcctttcatttgaaaaagattatccgaatgcaagcgtgattttgctagaacaaaactatcgttcaacgaaacggattttgcgcgcggcaaacgaggtcattaaaaacaactctaaccgcaaaccgaaaaatttgtggacggaaaacgatgaaggcatcaaaatttcctattatcgcggtgataatgaattcggagaaggacagtttgtggccggcaaaattcatcagcttcacagctcaggcaagcggaaactgtctgatatcgccatattataccggacaaacgcgcagtcccgtgtgattgaggaaacgcttctcaaagcgggcttgaactataacattgtcggcggcacaaagttctatgacagaaaagaaattaaagacattcttgcgtacctgcgcctcgtatccaatccggatgacgatatcagtttcacgcgcattgtcaatgtgccgaagcgcggagtcggcgcgacatcacttgaaaaaatcgcttcgtatgcggccataaacggcttgtcatttttccaagcgattcagcaggttgattttatcggcgtcagtgccaaagcggcaaacgcgcttgacagctttagacagatgattgaaaacctgaccaatatgcaggattacttatccattacagagctgacagaagaaattcttgataagacggaatacagagaaatgctgaaggctgagaaatcgatcgaagcccaaagccgtttagaaaatatcgacgagttcctgtctgttacgaaaaactttgaacagaaaagtgaagacaagacactcgttgcgttcctgacagacttggcgttgatcgcagatattgatcagctcgatcagcaggaggaagagtcaggcggcaaggatgcgatcaccctgatgacactgcacgccgcgaaaggactggagtttccggttgttttcttgatggggcttgaagaaggcgtcttcccgcatagccgttcactcatggaggaagcggaaatggaagaagaacgccgccttgcgtacgttgggattacaagggcggaacaggagctttatctgaccaatgctaaaatgcgcaccttgtttggccggacaaatatgaacccggaatctcgcttcattgctgaaataccggatgatttattggaaaacctaaatgagaaaaaagaaacgagagcgacgtctgcgagaaaaatgcagccgagacgcggccctgtttcacgcccggtatcctacgccagcaaaacaggcggcgacaccttaaactgggcagtcggagataaggcgggccataaaaaatggggaacaggaactgtcgtcagcgtgaaaggcgaaggagaagggacggagctcgatattgcctttccgagccctgtcggcgtgaaacgcctgttagcagcatttgctcctattgaaaagcagtaattgaagaggaaaggaagaagcagatggacaaagaaacagcgaagcagcgggcagaagaactgcgccgcaccatcaacaagtatagctatgaatattacaccttagatgaaccgagcgtcccagatgccgaatacgacagattgatgcaggagctgattgcgatcgaggaggagcacccagacctcagaacgcctgactctcctacgcagcgcgtcggcggagccgtgcttgaagcgtttcaaaaagtcacccacggcacaccgatgctcagtctgggcaacgcctttaatgctgatgatcttcgtgatttcgaccgccgtgtgcgccaagccgtcggcgacgatgtggcgtataatgtggagctgaaaatagacggtcttgctgtttctctccgttatgaagacggctattttgtcagaggggccacaagaggtgacggaacgactggagaggatattacggagaacctgaagacgatccgcaatatcccccttaaaatgaaccgtgagctgtcaatcgaagtgcgcggagaggcgtatatgccgaaacgttcgtttgaagcactcaatgaggaacggattaaaaatgaggaagaaccgttcgccaatccgcgaaatgccgcggcgggatctctcaggcagctcgatccgaaaattgcagcgaaacgaaacctcgatatcttcgtctacagtatagcggagcttgacgagatgggtgtggagacgcaaagccaagggcttgattttctcgacgaactcggatttaaaacgaatcaggaacgaaaaaaatgcggcagcatagaagaagtcatagtgctgatcgatgagtttcaggcgaagcgcgcagacctgccgtatgaaatagacggcattgtcattaaagtcgattctctcgatcagcaggaggagctcggttttacggcgaaaagcccgcgctgggccatcgcgtataagtttcctgctgaagaggtcgtgacgaagcttctcgatatcgaattaaatgtcggcagaacgggtgtgatcacgccgaccgcgattcttgagccggtaaaagttgccggcacaacggtctcaagagcatcccttcataacgaagatttaattaaagagaaggacattcggattttggataaggttgtcgtcaaaaaagcgggcgatatcatcccggaagttgtgaatgtcctcgttgaacagcgaacaggagaagaaaaggaattcagcatgccgacggaatgtcctgaatgcggcagtgagctcgtccggatcgaaggagaagtggcgcttcgctgcattaaccctgaatgtccggcgcaaatccgggaagggctgatccatttcgtttcccgcaatgccatgaacattgacgggctcggcgaacgagtgatcacacagctgtttgaggaaaaccttgtccgcaatgtggcagatttatataagctgacgaaggaacgagtcatccagctcgagcgcatgggtgaaaagtccactgaaaacctgatcagctccatccaaaaatcaaaagaaaattcgttagagcgtttgctgtttgggcttggtatccgttttatcggatcaaaggctgcaaagacgcttgccatgcattttgaaagcttggagaacctgaaaaaagcctcaaaagaggaacttctcgcggtagatgaaatcggtgaaaaaatggctgacgcggtcatcacctattttcataaagaagaaatgcttgaactcttgaatgaacttcaggagctgggcgtaaacacgctctacaaaggcccgaaaaaagtaaaagcagaggacagcgactcttactttgccggtaaaacaattgttctgacaggaaagctggaagagctgtcaagaaacgaagccaaagcgcaaatcgaagcgctgggcggaaagctgactggaagcgtcagcaaaaacacagacttagtcatcgccggagaagcggcgggaagcaagctgacaaaagcacaagagctgaacattgaagtgtggaatgaagaacagttaatgggagagctaaagaaataagaggagtgttttctattgaaaaagacgttggcattggcggcaacggcggcagtattaatgctgtctgcctgctcgtcaggttttgggggggagaaggaggaagagattacgcaaaagacggcgaaatcgtcagaaaaagcgattgtcccgaaatataatatctctgactcctattacaaaatggtgctgccgtttaaggcaggcaaagcgcgcggcttaacaacggaacagctgaacactaggctggacattgacgagtttgaaacagggctgatgcgtcttgcccaagattctttctcgactgacgattatctgttccaagaaggacaatatttagatgaggatacagtattaagctggctggcacggaaaaaaacgggctctgatttgaaaaaagccgaaaaagaagataaaaacttcaaaaatgaaggcttgaacccggcgctcccgagttctggttcaacagaagaaaagaacgaaagcagcccgatttatttagcatccatgcttgagcacgattatttagtcagaaaagacaagaattctatccagcttggcggcgtcatgatcggactggcgttaaactcagtgtattactatcgtgaaaaaactggcgacccgcaaaaagaagtggagattaaagacagcacgcttcgccagcagggagaaaaaattgcacaggaggttattaaccgcctccgcaaaaaagataacttgaagaatgtgccgattaccgtcgcgctctacaagcaggcgtcaaaaacatcgattgtgccggggaacttcatcgccaaaacagaggtcaaagcaggctctactgatatctcaaattgggatgacatcaatgaaaaatatgtattctatccggcagatacaaccacagcagaaaaatacccggatgacaccgaggtctttaagcggttcaaaaactcaattgaagaatatttcccgaactatacaggcgttgtcggtacagcgctgtatgaaaatgatgaaatgaagaaaatgaagattgacataccaatgcaattctacggaaaaagtgaagttgtcgcgtttacccagttcttaacgggtgaagtgatggactactactctaagagctcagttgatgtcgaagtcaatatcacgtcctcagacggacaggaagcggtcattatccgcaatgccggagataaagagccgactgttcacatttatgactgatagaaaacccttgtgccatattggcacaaggggttttatgttacaattaacaggaaaagggaaaatatttccgcttctgccgaaacacaaatcaaggggaggtatgttgatgctggaaatcgtgtgaaaacaatcattatcaaatctatagcaatgaaaggatgttagacatgcataaagatatcaaaaaaatatttgaggaagagcaggttttggcagaagctgcagcgagatacggtttctcaaaagatcaggtgcgttttctggctgatgcggaaaactatgtatatgaatgtatgaaagacaatcaaccttatattttaaagattacccatacgattcggagatcttctgattatataatgggagagatggaatggctccgtcaccttgcaataggaggaatttcagtagccaaaccgctcccgtcgctgaacggaaaagatgtagaagcagtgccggacggaaacggcgggtcatttttattgagagtgtatgagaaagcgccggggcaaaaagtggatgaatcggactggaatgaaacgctattttatgagcttggcagatacacaggcagcatgcacagcttgacaaaaagctacaaattgagcaatcccgctttcaaaagacaggaatgggatgaagaggagcaattaaagctgagaaaatatgtacctgaagatcagataaaggtgtttcagcaagccgattatttgatgaatgaactgcggaggctcccgaaaagccaggacagctacggcttggtgcatgcggatctgcaccatggcaattttaactgggatcatggcaaaatcacggcatttgattttgatgatatcggctacaactggtttgttaacgatattagcattcttctctacaatgtcctgtggtatcctgttgtgccatatgatgataaagctgcgtttacagaagaatttatgacgcattttatgaaagggtactgggaggaaaatgagcttgaccctacatggctgatgataatacctgatttcctccgccttcgccatatgctgatttacggattgctgcatcagatgtttgaccttaacacaataggagaagaggaaaaagaaatgctggccggtttcagaagagatatagagaatggcacgccgattacagcatttgatttttcagcactggtgtagatagaaaaagccaatgggattccagtcccattggcttttataatgtatcacacttcacgccgactacgccttcaatggctttaatgtcatagtagacatcggtcgtgtatctgtttttatggacgcggaccttcacttccataattggaaaatccttttcgcctaggtcgtcgatccgaacggagtgtgctttgatatctcttcttttcatttcttttaaaatctctgtcattttgtctttatcagaaagtgacattctgatgcggatgtctttttcctgcaggcggtcggggccgatttttctgaccacccatgggagaaattccacgctgatcaggatgaacagaagactggcaaacgcttctttataaaaaccggctcccgtagccagcccgagccccgctgccccccagatcatggccgatgtcgtcaggccggaaatgacatcattgctttttcgcaggatgacaccggctccgataaacccgacgccggagatgatttgtgccggcagacgaagcggatccatcatgatgcggtagtatttagggaaatgatatgccgcattaatactgacgatcgtcagcatgcatgagctgactgcgatgacgatacaggtttttaatccgagcggcttattttttaattcgcgttcaagcccgatgaccatgccaatcaatgtggcaatgcccaatttcaataaaatatcaggatcaatataccagctcaacagcaacttcccccttctctaaggtgtttttaaataaatatgattttctcacagtatttatagcaaaacaagggtacaaaagccaccaagctgcgcttgatggcttattgcttactttttgcgttttaacagcttttccatgacaccgaataatcggtaagaggcttttgcaggacgttttgtgatcatgctgacaatgatgccggcaatcatactgagaataaacccagggatgatttcgtacacaccggttgattttgccaggccggttgtaatccagatcaacacggtcgcagccccgacaatcatggcagcaagcgcgccccattcgttcattcgcttccaatacagactgagcagaatcgcaggtccgaaagctgaaccgaagccggcccaagcgtatccgaccaaatcaagaatggtgctgttcgggttcaatgacaagagtaccgcgataacggcaatgactaagacggacaatcgcccgatcatgaccaattctttatcagaagcttttcgtctgaaaaatgaccggtataaatcctctgttacagcacttgctgtgactaagagctgtgaggaaatcgaactcatgatggcagccaaaatagctgacaataagaaccctgtaattaatgggtggaacaagattttagagaagataatgaaaatcatctccggatcttttacagcaactccgaatttatgggcgtatgcaacaccgattaaacccgtcagcacggaacctagaactgtaatgatcatccagctcataccgattcggcgtgcaggttttaaatctttaatgtctttaatggccataaatcggacgatgatatgaggctggccgtagtagcccaacccccaggctaaataggaaataatgctaatgacgctcgcgcctttaaaaatatccaataagtgtgggttaacagcgtcgatttcatggaaagtcggagcaacgccgcccacatgggtaaaagcaacgatcggcacaagcactagtgctgcaaacatgatcgcaccctgcacgaagtcagtcagactgacagcaaggaaaccgccaaacagtgtgtataatacgacaactgcggtggtcagaaacaagcctaatttgtaatccgcaccaaaagcagattcaaacagccgtccgccagataccataccggaagaggtatacaatgtgaaaaagatcatgatgatcaatgcagatacgattttcagcagtgatgaagaatgctggaatcgtttatcaaagaaatcaggaatcgtaatcgcatcatccgccgcttctgtataagcacgcagccttggagccagcagcaagtaatttgagtacgccccgattgtaagacctaaagcaagccataaggtggacagccctgtcgcaaacatcgcgccgggaacacccatcagcatccatccgctcatatcggccgcgccggcagacaaagcagtaacgaatggtccgaggcctcttcctccaagcatgtaatcattgatgtcagtggttttcttgaatgcataccagccgattaacagcatggcaataaagtaaattcctaaagatataataatttcaatactcacgttttaccctctcttcatttctaataatgttgcatcacctctcaaattgatggtgccagttaagcagcctggcgtaagtgcaaaacaaaagaaattcctttgcgggtgcacttggtaacttaacctaacaaagtattcccggccattcaagcgatgaaaccttgatcatgagcggggaaaaccgttgcaaacctagaagggaataaagaataaaacgctttcaagaaataattaaagtaaaaatattcagaaaaatatttcgtttctccttctcctcattttagtataaaatatatagggtattgtttcgaaaacacaggcctgtctcaaggcgttttgttgctttaaagggcttgtttttgatatgatcagtattatatgacttaacggagaaatatgtggaggtggatcatatgtcacgaatttcaatagaagaagtaaagcacgttgcgcaccttgcaagacttgcaattactgaagaagaagcaaaaatgttcactgaacagctcgacagtatcatttcatttgccgaggagcttaatgaggttaacacagacaatgtggagcctacaactcacgtgctgaaaatgaaaaatgtcatgagagaagatgaagcgggtaaaggtcttccggttgaggatgtcatgaaaaatgcgcctgaccataaagacggctatattcgtgtgccatcaattctggactaaaggagggacacaagaatgtcattatttgatcataaaatcacagaattaaaacagctcatacataaaaaagagattaagatttctgatctggttgacgaatcttataaacgcatccaagcggttgatgataaggtacaagcctttttggcattagatgaagaaagagcgcgcgcatacgcgaaggagcttgatgaggcggttgacgggcgttctgagcacggtcttcttttcggtatgccgatcggcgtaaaagataatatcgtaacaaaagggctgcgcacaacatgctccagcaaaattctcgaaaactttgatccgatctatgacgctactgtcgttcagcgccttcaagacgctgaagcggtcacaatcggaaaactgaacatggacgaattcgccatgggatcatctaccgaaaactcagcttacaagctgacgaaaaacccttggaacttagaaacagttcccggcggttcaagcggcggatctgcggctgcggttgctgcgggagaagttccgttttctcttggatctgacacaggcggctccatccgtcagccggcatctttctgcggcgttgtcggattaaaacctacatacggacgtgtatctcgttacggtctggtcgcatttgcgtcttcattagaccaaatcgggccgattacacgtacggttgaggataacgcgtttttacttcaagcgatttccggcgtagacaaaatggactccacgagtgcaaatgtggacgtgcctgattttctttcttcattaactggcgacatcaaaggactgaaaatcgccgttccgaaagaataccttggtgaaggtgtcggcaaagaagcgagagaatctgtcctggcagcgctgaaagtccttgaaggtctcggcgctacatgggaagaagtgtctcttccgcacagtaaatacgcgcttgcgacatattacctgctgtcatcttctgaagcgtcagcgaaccttgcacgctttgacggcatccgttacggctaccgcacagacaacgcggataacctgatcgacctttacaagcaaacgcgcgctgaaggtttcggaaatgaagtcaaacgccgcatcatgctcggaacgtttgctttaagctcaggctactacgatgcgtactacaaaaaagcgcaaaaagtgcgtacgttgattaagaaggatttcgaggacgtatttgaaaaatatgatgttattgttggaccgactacaccgacacctgcgtttaaaatcggtgaaaacacgaaggatccgctcacaatgtacgcaaacgatatcttaacgattccggtcaaccttgccggcgtaccgggaatcagcgtgccatgcggattagcagacggacttccgctcggcctgcaaatcatcggaaaacactttgatgaaagcactgtataccgcgttgctcatgcatttgaacaagcgacagaccatcataaagcaaaacctgaactgtaaggggtgaaaagaattgaactttgaaacggtaatcggacttgaagtccacgttgagttaaaaacaaaatcaaaaattttctcaagctctccaacgccattcggcgcggaggcgaatacgcagacaagcgttattgacctcggatatccgggcgtcctgcctgttctgaacaaagaagccgttgaattcgcaatgaaagccgctatggcgctcaactgtgagatcgcaacggatacgaagtttgaccgcaaaaactatttctatcctgacaacccgaaagcgtatcagatttctcaatttgataagccaatcggcgaaaacggctggatcgaaattgaagtcggcggaaaaacaaaacgcatcggcatcacgcgccttcaccttgaagaagatgccggaaaactgacacacacaggcgacggctattctcttgttgacttcaaccgccaaggaacgccgcttgttgagatcgtatcagagccggatatccgcacgccggaagaagcgtacgcgtatcttgaaaagctgaaatccatcatccagtatacaggcgtttctgactgtaaaatggaagaaggctcacttcgctgtgacgccaatatctctcttcgtccgatcggccaagaggaattcggcacaaaaacagaattaaaaaacttgaactcctttgcgtttgttcaaaaaggccttgagcatgaagaaaaacgccaggagcaggttcttctttccggcggcgtcatccagcaagaaactcgccgttatgatgaagcaacgaagaaaaccattcttatgcgtgtcaaagagggatctgacgactaccgttacttcccagagccggatctagtcgagctctacattgatgatgaatggaaggaacgcgtaaaagcaagcattcctgagcttccggatgagcgccgcaagcgttatatcgaagagcttggcttgcctgcatatgacgcgatggttctgacgctgacaaaagaaatggctgatttcttcgaagaaaccgttcaaaaaggcgctgaagccaaacaagcgtctaactggctgatgggtgaagtgtcagcttacctaaacgctgagcaaaaagagcttgccgatgttgccctgacacctgaaggccttgccggcatgatcaaattgattgaaaaaggaaccatttcttctaagatcgcgaagaaagtgtttaaagaattgattgaaaaaggcggcgacgctgagaagattgtgaaagagaaaggccttgttcagatttctgacgaaggcgtgcttctgaagcttgtcactgaggcgcttgacaacaatcctcaatcaatcgaagactttaaaaacggaaaagaccgcgcgatcggcttcctagtcggacagattatgaaagcgtccaaaggacaagccaacccgccgatggtcaacaaaattctgcttgaagaaattaaaaaacgctaataaaaaagcagcccttagaggctgctttttttatggtcaaattgagataaagacagagatgagggcccgaagcctttcaacttctttgtcgttggttccggtcaaattggacagcatgcctttaataatcggcttgcgcggtttatcctgagtcaattcttcctcgataacatcaagtgacacggtgatatcctcgggcagcgtgctgttttctttcactttctgaatgtcctcaagcagctggtcttttcccgcaggcatcgggttgaaaatgtcttttgatacaatcggattgagtgcagaacggctcagcccctgtacaagatcattcagtctctcaataataaaggctgagatttcttctgcatcgatattaagctcaccgttaaataccatcacgttcatataggaatgcacaatgcctcttgccatgatggacagatctgcgacataccgctcgattccttcgccataggataccagcaaggcgttccggtacagcttatccgtctccatggttactttgtaaaagtattgcttgatttcttgattttccggaatgatattttcggtaagcaaaagaacgataaaatctttatgatcgcgaaaatcctcaaattgagcgccaatttgcttttttaacacttccttagggggctttccggcgagatcttcttctatatttttcattttgttcatagacataccgatataatattcacaggcagataacagcagcgcttctttcgatttgaagtgcaaataaaaagcgcccttcgaaatgccgcattcactggcgatttcttggatcgtcgtagctgcgaatccttttttcgcaaataaacgaatgctggtttttatgattctctcttttttttcattcatgacgtgcttccccttaatccttgaaaaatttagtaaaattttctggtatatgagttgacgttgttgcgttataacgtttagtattatatagaatgaccagtcagtcaataaaaaatgtaatggaggatatgatgaaccacgttattaatttcgttctgaaaaacaaattcgccgtatggctgatgacgattattgtaacggcagccggcttgtatgcgggtatgaatatgaagcaagagtctattcctgacgtgaacatgccttacttgacgatcagcacgacatatccgggtgcaacaccaagccaagtggctgatgaagtgaccaaaccggttgaacaagccgtacagaacttggacggtgtcagcgttgtgacgtcgacgtcctatgaaaacgcatcgtcggtcatgattgaatatgattatgagaaagatatggacaaagcgaaaacagaagcagctgaagcgttagaaaacgtcaacctgcctgatgacgcgaaggatccggagatttcacgctacagcttgaactcattcccgattctgacgctgagcgtgtccagtgataaagataatctacaagagctgacgaaacaagtggaggacagcctcgtttctaaacttgaaggcatagaaggcgttgcgtccgtccaagtatcaggccagcaggtggaagaggttgaattctctttcaaagaagacaaactgaaggaatacggccttgatgaagatacagtcaagcaagtgattcaaggttcagatgtgacaactccgcttggattgtacacattcggaaatgaagaaaaatctgtcgtcgtcagcggcgatattgaaacaattaaagatttgaagaatatgagaatcccgacggtatctgcttcaagtgcaggcagcagcgcagcatctcaagcgggtgcgcagagtgctcaagcagcccaaagcgcacaagcggcagcacaggcgcagcaaagcgcaagcacagcagtgccgacagtcaagctttctgacattgctacaattaaagatgtgaaaaaagctgaatctgtttcacgcacaaatggcaaagacagcatcggcatcaatatcgtcaaagcaaacgatgcgaatacggtagaggttgccgacaatgtcaaagctgagctgaagaagttcaaagaagaccataaaggcttcaattacagcgcaactctcgacatggcggagccgatcacacagtcagttgacacgatgttaagcaaagccatcttcggtgctatttttgcgattgtgattattctcttattcttaagagatatcaaatcaacattaatttctgttgtttcaattccattatcattgctgatcgcactccttgtgctgcagcagcttgatatcacattgaatattatgacgctcggcgcaatgaccgttgccatcggacgtgtagtcgatgactccatcgttgtgatcgagaacatttaccgccgcatgagactcaaagatgagccgctccgcggaaaagccttggttcgtgaagcgacgaaggaaatgtttaaaccgatcatgtcatcgacgattgtgacaattgcggtattcctgccgctcgcacttgtaggcggacaaatcggtgagttgtttattccgtttgccttaacgattgtttttgcgcttgccgcatccctggtgatttcgatcacgcttgtgccgatgctcgcacacagcctgttcaaaaaatcattaaccggtgcgccgattaaagcgaaagaacacaaaccaggcagacttgcaaacatctataaaaaagtattgaactgggcgcttagccacaaatggatcacgtctatcatcgctgttctgatgctccttggaagcttgttcctcgtaccgttaatcggtgccagctacctgccgtctgaggaagaaaaaacgatgcagctcacatacagcccagaaccgggtgaaacgaaaaaagaagccgaaaatgaagctgaaaaagcggaaaaaatcctgcttgaccgcaagcatgtcgatacggttcagtattcattaggctctggcagcccgcttgccggaggagattctaacggtgcgttattctatatcaaatatgaaagcgacacacctgactttgataaagaaaaagataacgttctgaaggaaatccaaaagcaatctgaccgcggagaatggaagtcacaggacttcagctcttcaggcaataacaacgaattaacatactatgtgtatggcgattctgaaaacgatattaaagacacggtcaaagatattgaaaaaatcatgaaggatgaaaaggatctgaaaaacgtaaattcaggcctttccagcacatatgatgagtacacatttgtcgctgaccaagaaaaactaagcaaactcggtttaaccgcgtctcaaatttctcaggccttaatgtcacaaacatcgcaagaaccgcttaccaccgtgaaaaaagacggcaaagagcttgatgtgaacattaagacagaaaaagacgagtataagagtgtgaaagatttagagaataaaaagatcacttccgcgactggccaggaagtcaaaatcggcgatgtggcaaaagtgaaggaaggatcaacatcagataccgtgtcaaaacgtgatggaaaagtctatgcggatgtcacaggtgaggttacatctgacaacgtcacagccgtatcaactgctatccagaagaaaatcgataagcttgaccatcctgataacgtatcgattgacacaggcggcgtatcagcggatatcgctgattccttcacgaagctcggtttagcgatgctggcagcaatagcgatcgtttaccttgtgctcgtgattaccttcggcggagcactagcgccatttgcgattctgttctcattgccgttcacagtcatcggtgccctggtcggactttacgtatcaggtgaaacgatcagtctgaacgccatgatcggtatgctcatgctgatcggtatcgttgtcacgaatgccattgtcttaattgaccgcgtgattcataaggaagcggaaggcctgtctacgagagaagcgctcctggaagccggctctacacgactccgtccgatcctgatgacagccattgcgacaatcggcgccttgattccattagccctcggcttcgaaggcggaagccaggtcatttcaaaaggactcggcgtcacggttatcggcggtttaatcagttcaacgcttctgacgctcttgatcgtgccaatcgtatatgaagtattggcgaagttccgcaagaaaaaaccgggaacggaagaagagtaaaaaaacaaaaagcctcagctatgctggggctttcagcttgttgaaaaaccctcgcattcgttgtcaggtctgcgcgtcggtgctcacgaattctacattcactccgctccaatgctcccccttcctagactacaagggttttcaatcaagctgaaagaatgttaaggatgacaaaagctcaaaacaagaatcagttttgagcttttgtgcgttttcacctgtaagattatgtacattttgttgcgatttttttaactcatagtataattaaaggttgttagtgtaaaaatggatcggatactcttaagtaggatgatgagataatgaaacgtgcacgcataatatacaatccgacttcaggacgggagatctttaaaaagcatcttgcccaggtcctgcaaaaatttgaacaagccggctatgaaacctccacccatgcgacgacatgcgcaggagacgctacacacgctgccaaggaagcggcattgcgtgagtttgacctgatcattgcggcaggcggagacggaacgatcaacgaggtcgtcaacgggcttgcgcctttagacaaccgtccgacactcggtgtgattcctgtcggcacaacgaacgacttcgccagagcgctcggcattccgcgcgaggatattttaaaagcagcagatacggtcattaacggcgttgcccgcccgattgacatcggacaggtcaacggccagtattttatcaatatcgccggaggaggccgcctgacggagctgacgtacgacgtgccaagcaaactcaaaacaatgctcggccagcttgcttattatttaaaaggaatggaaatgctgccttcacttcgtccgacagaagtcgagattgaatatgacggcaagctgtttcaaggtgaaatcatgctgtttttggtcacgctgacaaactccgtcggcgggttcgaaaagctcgcgccggattccagcctgaatgacggcatgtttgatttgatgatactaaagaaagcaaaccttgctgaatttatcagggtcgccacgatggcgcttcgcggcgaacacatcaacgaccagcacattatttatacaaaagcgaaccgcgtgaaagtcaatgtatcagaaaagatgcagctgaacctggacggcgagtacggcggcatgctgccgggcgaattcgtgaatctgtaccggcacattcacgtcgtcatgccgaaggagaaagcggaacagctggatgactaaaacttggctttgtaagccaagctcagaatgttgacaaaatcctaaaacagttttcgttttaggattttgtcatcttttcagcgtgattgaaaacctttgaagtctaggaagggcgagcatcggagcacagcgaatgttgaattcgtgagcaccgaagcacaggactgacaacgaatgcgaaggtttgcctacacgctgaaacttggcttgaataggccaagtttttctttcgcttaaaacaagaggtgaacatacatgaaaatgaaacccccagtagaaaaaaacgaatactatgacgtgacatttgaggatttgacccacgaaggagcgggtgtcgcaaaggtccaaggattcccgatctttgtgccgaacgccctgccggaggaaaaagcccaaatcaaagtcacacgtgtcaaaaaagggttcgccttcggccgtctgattgagctgaaggaagaaagcccgcatagaacggatgccccatgcccgatttacaagcaatgcggaggctgtcagcttcagcacatgacctacgaaggccagctcttgtttaaacagaaacaagtcaaagacgtcttagaacgcatcggcaagctggacctttcaaacgtcaccgtgcacccgacactcggcatggaagacccgtggaactacagaaacaaagcacaggtgccggtaggagaacgggaaggcggactcgtcgcgggattctatcagcaaagaagccatgacatcatcgacatgagcgcctgcctgatccagcaatccaaaaacgacgaagccgttcaagctgtcaaagacatttgcgcaaactacggtgtcaaagcctacaacgaagaacgccacaaaggctggctccgccacatcatggtcagatacggcgttgttacgggcgaaatgatgatcgtcttcatcacaagaacaagcgacttcccgcacaaagcgaagatcatcgaagacatcacagcgcaattcccgcacgtcaaatccatcgtgcaaaacatcaacccaaacaaaacaaacgtcatttttggcaacgaaacaaacgtcatctggggcgaagaatacatctacgacctcattggagacgtcaaattcgccatctccgccagatcgttctatcaggtcaatccggagcaaaccaaagtgctctacgacaaagcgcttgagtacgctgagcttcaaggggaagaaaccgtcatcgacgcctactgcggcatcggaacgatttctttatttctggcaaagcaagcgaaaaaagtgtacggcgtagaaattgtaccggaagcaattgaggatgccaaacgaaacgccgagctcaacggcatcacaaacgctgagttcgcggtcggggaagcggaaactgtgattccaaaatggtatgaagaaggcattacagctgatacgctagtcgtcgacccaccaagaaaaggctgcgacgaagccctcctgcggacgattgtggagatgaaaccgaagcgggtggtgtatgtgtcctgtaatcctggcacgcttgcgagagacctgcgggtggttgaggatggcgggtatcagacgctcgaagtgcagcctgtggatatgtttccgcatacgaatcatgtggagtgttgcgtgttgcttgaaaaaaacatgtgtgagttcgagaaattatagtatatctcggacttccgtcttctttaattcttcgatacactcaattggtttgtgaagaattttttcatcaatagttgggtttgagtgaattgttcaagttgttttagtaaatcatttaaattatctttaagtcggattaaggtctctaatcggagtctctacgcgattttgttttcagataggtatttgtttcaattggataggcttaacaaacaaatttgaaaaaagatcaataagcaacaagtcgaattaccagtcttacagatgtttaatacaatcgaaattgtcccctttgattatcaagggaagttagaggataacatagcagatgctattatgaccattaaaggagcaaataaatcttactttgatgtttgttgattttctttaacgctcattgttctaaagcaaatcttgacaaacggcaaattgtttttggtgttggtcaagatttggattgtctattgtttagaagacaccaataaaaactgcttttaaaaataattaagattgacaaatgaacgacgtagacagctttatgagcaaataaaccaattgtaaaggaaaaaaatcaaatataatcatattgttttcaatgaaaatgaaattacatttactattcccgatatcatagatgtaatcaataggatacaggctgtcataactcaattaaagcaagtgttaataaccgttgatccattggtaagtgaatatgccgaaacttgtgtaaggaagctctctaattagggggctttttgctttaaaaagaatagacatgtatcaattgacaaggaaaaggaaaaagttatatactgtatttaacaaatgttaaatcttctatttaacatagaaataggaggtgtaaaatgcaactcggcgatattgctaatgtaaagacagggcttgtgttaagtaggaaaaaggcagaagttgaatatgatgcgaaagctacatacaagctactttcactcaaaaatattgcggaagatggcatgattgaaaacgattcgtttgaggagtttgtaagtaatgacgatttagacgatcactactttacaaaagaaggtgatgtgctaatgcggttgagccacccacacacagcggttttcattgaaaaacaatatgaagggttgttaattccatcgtatttcgccatcattaaagtagacaaaacaaggttcctacgagagtacattgcatggtatctaaactcatttgaagtaaaaaaagagttggaacgctctcagtcaggtagtcgtatccccagtaccaatcaaaatgtaattaaaacactccctgttgtctggacaactctatcaaagcaaaaagcattaatcgaactttacaagctccatcaaaaagaaaaaatgctttataagagattaattgaggaaaaagacttattattccaagcgatttcacaacaaattttaaaggattcaaaatcggagggaaatattaatgattgaactaacaacacaagacaaaattaacagtgttttatggcaggccgcagatacttttagagggaaaattgattcctcaacatataaagattatattctaacaatgctatttataaagtatttaagtgatacatacaaggagcatttggaagaatatacgaagaaatataatggtgatgaacgacgcattgaacgtgctttatcaagagaacgttttgtacttgatgaacaatctacttttgattatttgtatagcaaaagaaatgatcctaaaattggagaaatcattaacaaagcattggaacgcattgaaaatgaaaacacaggtaaacttcgtggtgtatttcgtaacattgactttaacagtgaatcaatccttgggcaagcgaaagagcgaaatgcaatgttacgatcacttttggaggattttagacatttatctctaagaccatcacagttaggaaatgaagatatagtagggaatgcataccagtacatgattggactttttgcatcggatgcaggtaaaaagggtggcgagttctatacacccgctgaagtatcagaattactggcacgtttagttaaaccgcaagaaaacgaccgtatttatgatccaacatgcggatcaggttcgttgttaataaaagtggctaaacaggttccaagtagaaaagttgctatatacggtcaggaacgtaatggtgcaactcattcattagctcttatgaacatgtacctacatggggttgacgatgctaagattgagtggggcgatacattagcaaatcccttacatttagaggatggaaagttgatgaagttccaagcaatcgttgctaatcctccattttcattagataagtgggctatgggcttcgcaggagaaggaacaaatgacaaaaaatttaaaatggagtcaagttttgatccctatagacgttttgagtggggagtacctccaagttcaaaaggagactatgcatttgttcaacatatgctttattcattagctgaaaatggacgtatggctactattcttccacatggcgtactgttccgaggggcaagtgaagggaaaatacgtcaacaaattattgagatgaacttattggatgcggttattggtttaccagaaggattattttttggaacaagtattcctgcgtgtatcatggtatttaaaaaagaccgaaaacgaaatgatgttctttttattgatgcatctactgaagaacattttgaaaaaggaaaaaatcaaaattaccttcgagaaaaggatattgagagaattgttaggacatatgagaatcgggaaacaattgaaagatactcttatttggcaacaatagatgaaataaaagaaagtgaatttaatctaaatattccaagatatgtggacacttacgaagaagaggaacctgtcgatatgattacagtgaaaaataatatttcgaatataaagaaggaactacaagaagtagagttacaaatggagaagtatttgaaagagcttggattgtaggtgaatatacttgactaaaaataattatgttagaacggcgattggagaattaccttcagattgggaagtagaacttcttgataatatagcagaaagaaaatctggtcatacaccagataagaagatagaagagtattggaacggaaatattccctggatttcattgaaagacttatcacgattaaataaagggtttgtatatgaaacaacggattttacaacaaatgaagggattaagaactcttctgctgttttgttacctcaggggacaatagtcatttcaagggatgctacagttggaaaggttggaattcttgctgaggagatggctacgagtcaacattttatcaattatatttgtggggatagactgaataacgtttatctatactaccatttactatttagaaaccacattttcgaaaggattgctacaggaagcacaattaaaacaattggtttaagtttctttaaaaaactaaaggtagcactacctccaattagggaacaagaaagaattgcttctatcctttctgcttgggacaatacaattgatttaaaagaaaaactaattgattataaaaatgagcagaaacaaggattaatgcaaagattattgacaggagaagtaagattgccagggtttaagggggaatggaaaaaggaaaggattggtaaactcataactgaaagtaaagaaatagcaagtaaaccagatcttaataaaagaataaccgttagacttaatttaaaaggtattcagaaaagagatgtttcatctacagaaaaggaagatgctacaactcaataccttagaaagtcaggacaatttatttacggaaagcaaaatcttcataagggagcttttggcataattcctaaagcgttagaaggttatcaatcttcttcagatattcctgcattcaattttaatgaggaagttgatccttattggtttttttactatttttcaagggagagcttttatacaaacttggagaaaatatcaactggtacaggatcgaaaagaattaacccaaaagatttgtttaaggttaaaatccattttccaccttatacagaacaacaaaaactttcagaagtctttttatgttttgatagagagattagtctacttaaagaagaggtcgaagcattaaaagaacagaaaaaaggtcttatgcaattacttttaacggggaaagtcagagtaagggtataaatcatttactttatttcttcgtttttattaggaggtgtagagatggcaagggagaagagttatgatgaacgttacataagccaagttcctgcaattgaggttcttcgaaggttaggttatcaatatcttgaaccagaagaagccgagcagatgcgtgggaatttgtacaacgtattacttagaaatgttttgcaagaaaagttacggtcatttaattcttatgaatacaaaggggaaatatataagtttagtgactccaatatccaacaagctattcgagatttagatgaaccattaacaaatggtcttgtaaagacaaatgaagcgatttatgaaacgttaatgaaaggaagaacatattctgagtttttacctgatggctcaaaaaagtcatttacaattcaatttattgattggaagaacattgaaaataatgtgtttcatatagtggaagagtttaatgtggaacggatggatggacgtggaaacgttcggcctgatattttactgtttgtaaatggtattccttttgttgtaattgaatgtaagaaagcatccatctcgatggaacaagggataagtcaaatgattcgaaatcagggtaaggattatgttcctcaactgtttaagtttgtacaaatggttatgtctactaacaaaaatgaaactaagtatgcaacatgtaatacaccaaaaaagttttggtctgtatggaaggaagaaaaagaagtatggttagagtcttggttggacaaagctgtagaaagtagattgccaacaacacaggataagaatattatttctctgtttcatcctaagcgtttattagagatcactcaatttttcactctgttcgataaagacgtcaaaaaagtagctcgttatcaacaatattttgctataaaagaaatcattaaaacaattcaagaaagagatgaacatgggaatcgtcaaagtggtgtgatttggcatacacaaggatcaggaaaatcactaacgatggtgatgttagccaaatacattctttctgagttgtttgaatataatccgaaagttgttgttgttacagatcgggttgaattggataaacagattcataagacgttccgtcatacaagattaaaggcaagtagagcaacatcgggcggccatttaattgatctaatcaatgacaacaatgctgatattgtcacaacgttggttcataagttcgatacagcatcttcaaaacaaaaaccaattgagtcaaaggacatttttgttttagtagatgaatctcaccgaacacaatacggagagcttaatataaaaatgaaaaaggttttccctaatgcatgctacttaggttttacaggcacgccgttaatgaaaaaagaaaaaaatacgatgattaaatttggaaagctaattcacacatatacaattgcagatggtgtacgggataaggctattgtcccgttattatatgaaggaaaaatggttgatcaatcggttaatcaaaaggctattgataacagattagagatgattactcgtaatctaaatgacaagcaaaaggaagaagtaatgaaaaagtggagccaatttgaacgaattgcttcctccaaccaaagaataagtatggttgcatttgacataaatgaacatttttttaagaattacaaaacacaaggaagcaactttaaagcgatgttagctacaaatagcaagattgaggctattcgttactttgaatcatttgaagaacttggcgatttgaattgtgctgtagttatttctccacctgaccaacgtgagggacatgaagtggtcgatgtggaatcaaaggacaaagtacagcatttttggaaaagaatgatggatcgttatggaacacctgaagactatgaggatgccataaaagatgaatttattaatggtgatgaaattgacttactcattgtcgttgataaattgctcacaggttttgatgctccgagagctacagtgttgtatgttgataagccaatgaaagaacacactcttctacaagcgatagcgagggtaaaccgtctatatgaaggaaaggattatggctttatagtagattatagagggttattagataaacttgatcaagcaatgcaaatgtactcaggagcagggttagaaaactttgatcctaaggatttagagggagctatacatgatgtcattagtgtaattggttcgttaagacaatttcattctgatttattacaaatatttgctcctattaagaataaacaagatgttgaagagtatgaagtatggttagaagatgaagaacttcgagagagattttatgatgtattaagcaactttgggcggaatcttggtattgcattagaatctgaaaaaattcacaatgctctacggccagaggaacttcaaaagtataagaaagacttgaagtttttccaagagctaagaaaaagtgtgaagctccgctattccgacacaattgatcataaggaatacgaggcaaaaatgcaaaagctaatggataattacatttctgccgaagagattatccgtattacaaatcctgtagatattttaaatgaaaaagcattcgaggaagaattagaacgcctggattcaaaacgtgctaaagctgatgccattcgtactcgtttaacgaaaagtgtaagtgcaaaatgggatgaaaaccctgcattttataaaaagttctctgaacgtattcaagaagctattaaagaatacaaggataaacgaatctccgaagcagagtatctgaatcgaataaaggatataatgaaagattatcgcaaaggtgaatcaaatgacgattatccagaagtgattaaggaaaatcgaaaagcacaagcgttttatggagttgcaaaagaccttatgagcgaagttgcggagatttctgaaagttatggttcggatacactcggagatttagctttaaaaacggataaagtgattaaagaacaccaaaaggttgactggcataataatcttgaaattcacaatcgaattgcacaggacttagatgatcttctctttgattttgcagaagaaaatgggatagaaatagattatgatacaattgataaacttatagagcaaattaaaaccgttgctcttagacgttattaaggttgtgaacagcatggagagacatcaaatccagtacgtaaataaaataattgactttgctattcaacgaaagaatgttaagaatgttaatcttaacattaagcctgatatgacaatagaggtgtctgcacatgatgccgttccgttgaatttcatttatgattttgtgaaaagcaaaggtgcatggattgttaagaatgtaaaaaactttgaaaatgcacaaccaaatagccaaagtgggcgagagtatgtaagtggtgaatcctttaagtaccttggaaaacaatatcgtctacgagtgcaaaatactgaggaagaggaaatagtaaaatacttccgaggatttatctatttattcgttaaagatcccaatgattacgaccgcaaagctaaacttatggatgaatggtatcgtgagaaagcatttatgacatttcaggaatctcttaataagcaacttccattagtacaaaagtacggagttgataaacctaatcttgatttacgtacaatgaaagctcgttggggttccgctttaaccgacaagaatacgattttattaaatacagagctgataaaagcgccaaaattttgtatagattatgtaactttacatgagttaatccattttaagtacaatgaccatagtgaaagattttatgatatgctgtactcattaatgcccgattgggaaaagagaaaagcaattttagatgaagagattgtaaaagacttataagaaaaagaacctctttggcaacttaacaaccagattaatcaacaaaaggcagttcctaattttcatgtggagactgcctttttaatttcttattcggattttattggagaattggtctacaaaattgaggattaattgagaggtgaggtcttggacgaaaatatgtgggaattgtcgttcgcaagtggcaacaaactgcttcacacttcatctgaaatacggtgattcttcataacaggattagatgaacgaggattcgcttgtccaatgtgagtcatcattatctttcattctttcaactaaagacgcgataatagagaaatttttcctaataaaggctatctcgtcactttctgataaaggattttcaataatgaggttatcatcttttacaaatttgcaatctttgctaaccgcttgatgtacacgtaatggttttgcaacacgctgtaggtcgttctcttcttttgggagaagatcatttacaatttggacatgctgtttgctacttatggcagtgaactgtctttgttcatgggtataactctttaaaaaataatgtttattatagtttgataacatgaaattattctcattcggaggaggttttttattggataatacgtataatccttttgataagatgcagtttacatataacaattgtttcctttgtgggagtaaagatgtttcgcaaaaaactttagagcatgtattcccaaagtggttgttaaaaaggtttgagttatggaataagcaaatacaattattaaatggtacattaatttcatataggcaattgaccattccttgttgtaacaaatgtaacaacgaatatttatcacgtattgaaaacaaatttaggagggctgttgacaatggatatgatgcatttttaaatctagatgaagaaaccatctttttgtggtctgcaaaaattttatatggccttttatataagcaattatctttaccatttgataggaagtcaccgcgattgggaaccattacaagtcctgatctattagagaaatataggattctacatttattgttacaaggtgcgaggtataaaactaaatacgaagggaaaccatggtcaatctttattttccagagtcaagaatataaggatgaaagagattttgattatttcgatggattgttttccttagtgttagggattcgtattggaagagttagctttgtaatttgttttgaagatgcgggcatacagaaagtaatgtttgaggattattttagggatttgcaagagatatcattacatccgattcagtttaaggagatcatagcgaaagtacattataagcaaatcttatttagaaaaaatcctttctttatggttgttgaaggaaaagaaaacgatagaactgttttagtgaatcaaccaacaggagacttatttgatgaatgggatttcgaagattattcaaaaattttatcattgttttttaaaccttatggattacatttaaaagatatttatcacccacctggtaaaaccattagttttttatatggagaagaaggggaagttaaacatataccaaaataggtgtattatgaatgacaagataaataaaaaatgtataatttagggaaataagtcatctttgaaggcattgggaagaacccaatgctgtttttcattgttttacttttttgatttagttaatgccttctgctacctattgatataattcacccattttttctgtttccatagaaacctccagttttatttcaaaagctatatcaaatttatagatgtaggtagctaattaaaaattctttatcatcctcgtcttcaggcaaaataccaagagttttgtactcccataatgcaattctttgataccatctaactcagacgccaaaatatcgacattattataatcaagttggaattgactattgctatccaatgccaatgtatggttagtccaaacctgatcattattattttggtgcgcaattcttaatttctcaaaaagttctcggatttcccttaataaagttttgaagatatctttacttacgttgtattgggcaggtatatcttgtgaataaataatttggattattttctggttacttgaagtgaaagagaaccatggtagaatcatttaatacttctacataaagataaatttttgtccattcataaggtatgatgttatttaatttctgattaataagctgatacaaatcttgcatttttttagtttccaatcttttcaccttcaatcgtcgagaaatcttagttatcaaaatagctcagcagagaagggctgagccatttttgatttatagaccgaagtagtttattacaaattctttgtcgtcctcatctttaggcaatatccctaaattttgatatttccaaacatctcgtctttgaaggtcatcaagttcagaggataaaacattatcataattataatcaattgaaaactttccggtgttttctaattttaaagtgagattagtccaaatatcttggttgcctagtttaaattcctcttttagttcttcaaatagcttttgaatttcaattagcagttgatcgtaaatctcttcactcacatcaaagtgttccggtatataatgagaaaataaataatcactgttatttggtgttgtaaaataaaagtatatatctgctgagtcaccaagtatttcagcatataaaacgatcttttcccattgagatggaatcatttcatttagatgttcagcaatcttttgatatagttcacccattttttgagtttccattagattaacctctaactttgaattgttgatggcattatttaatatttaaataatccttaacaaattctttatcctcttcgtcttcggggaaaatacccaagttattgaactcccaaatcatttgtctttcgtattcgtccaaatcagactcaataacatcttcataatcataatcaattgaaaactttccagagctttcaagattcagtgtcaaatttgtccatgcttcgggattattttctttaaattcagtgtgtaactgcttaaacaactcttggaggtctagtagtagttcggtataaatttttttactgacctgaaattgttctggaatgtcgtgagagtatatatattcatcgttttctggtgtttgaaagaaaaaatacacttctctggaaccatctagtatttctgcataaagaacaactttgctccattcggaagggatcatgtcattaatttgttctgctattttttgatatagcacttccatcttttttgtttccactagattaaccccctggtttattttctatagtaacttgtctcgctctacgattacctatcttatattcaacattaaataatacaggtctaagtgaatctccctgataaaccggttctatattaacttttacttgcttaggaggttttccatttaacgcctttgaccacacttgctccattttgtaccatttcccgccgctcctattaatctgagaattcatcggcacgatattgtcgaactggcctgagcctttgaattgggtggcgattaaatggccgccgtcatcgtcaggctttcggtcctggggctttccagcattcgtctgtgcatattggtttcgttttgcttctcccagctgcaagtctgctttgacacttgtaattctaccatagttgtcagtcgtgtatgtgtagccttcttttgttttgtagatgatattgggcttcagcactttctttctgctccatcttgcgaaatgctcgccgtatttgacggttaccggcggtacatgtggtgctggagttcgtcttccgcttgatgacgttccgtatggtttcggaaggatgaccttggcgaatttttgcagtccttctttaagcgtgaccccgttgactgcgttgtaaggaacgcctgccggcactaaatcgtgacggggatgataggggagaatatccgcaagtgtgagatctccgatttgatttaatttggttttgacgtgtttttttgatacttctatgcctgtgtttactttttgtttgatgtgatcaacggtttgttttgagactgttatggctttttgggctgttgcagatttgcttgctgctgttttgacttttgccgtcactttggcggctgtgccagtttttgagacggcgccaacaccttttgtgccgacaactgatgtgacaacagtgcccactgcatatgagacccatcttgctcttgagtaggtgtcaccattcaccatgtctttttcgtatgattcttcgattgctgctgaaatggcttcatacgttttgatcgggtgagccacagctccggtaatcgcttcaacggttcctcccggatctgtgaccatatcccacaggcctacgaccgcgtccttcccggaatcataaaggccgacggcgacccctttgaagcctgcttcaagctcacgcgtgttttcaatttgggtgaagtatctctgctgttctgctgtcagattttcatagccaatcgtctttgccattgagtagaattcatcggcatccgcataatcatagtttttcagtctttctttcagtttttcaatctcgcgttccttcgcttcctctttcttaatcttcaagtaagcctcagtccgcttttcaatgtcgccttttttcttatgtatgtcactctcacggtacgctttggcgttgtagtggatgggtgtggcgtttttgcctttgcctgttgcttcttggagcttttggaagtcggacttgatgaattgttcgtttggttctgacagggcgtattctgtcttcaggtcttcgtccaaggcgtccaatttttccagtgtttttttgcgtttgtcgttggcatcggccagctcgtctttgaaggtttctgttgaaaacaggtcgagcgggaggatgtcgtcgatatcgttcaggatgtctttcatcgcttttttctgttcggacatgatggattttgattttttattggcatttgccagttcgtgctccaggaaggattcttcgatgtatgcgtcagagagggctttgtccttcgcggctccggcgatgctattgaaaaatgcgattttcatgtcgatgtagtcgatccattggtcggtgacgccgacgtggtcgtgatagaaggctttgatgttgctggcgccttttcctgaaaattcgctgtcactgagatcagcgacactttttaacgcttttctcaagttgaccatttgcgttcttagttctttgtactcttttgcacggtctgtcgcttccgaaagcagtgttttcgcttcaaatactttcatgaccatttcccttcttttgttcgctcaatatcaaaattttaccacggggcgggatgagggtgggggtgagaacgtgttttggtggaaaaatgagtcatttggcatgtgtctaagtacacggttttgatatgatgatgatagatcaattaaaaggggaagagctcatttggataaagatttcttaatcataaagatcaaggatattcaaaaaggcgacacgctaacgaaccgcgcctgcgggaactgggatatgaaattgtccagagcaaaagaatgtaaacgggcaattgttgttcggagcggtgtgattttaaatgtttacaagatcgttgacgcttgggaatcagatgaacccgccaagctcactaaaacgaataatagagttcggtttcaattggcagagtgccatgactattcttatatgattggcggtacgctgaaaacgaaaacgcaaaatccggtttcgagtctatccttagaaaccttaatggaactagtaaaataaaaggagcccagcatgtatctctataaagtaaacagccaaaaccaaatcgaagatattcgcgagaaaccgtttaaaaaagaaaaagagattcaggatttatgtgaaatcaatcttcagcggatgttggggctcaggtttgtgaaatctgaattcaggatcagcaatttccgcattgatacgttagcgtttgatgatgagacaaatgctttcgtgattatcgagtataaaaatacgaaaaacttcagtgttgttgaccagggctacgcctacttagcagcaatgctcaatcataaagcagatttcattcttgagtacaatgaaaatcatgatcttccgttaaagcgggatgatgtagactggtcgcagtcgaaggtcatttttatctcacctgtatttacggtgtatcaaaagcaatcgatccattttaaagatctgccaattgaattgtgggagattaaaaggtacgaaaatgatctgatccagttgaatcaaatgaaggctgatggcgtctccgagtcgattaagaccatttcacggcaaagtgagaccattcaagaggtcagcaaagaaattaaagtgttttctgaagaggatcatcttgcagataaaccgtttgacatcatagagctttatcagcagctaaaggaattcatttttaatttggacgatcatatttcaatcaaaccgacaaagctttatattgcgtttacatcaaataagcgaaatttcactgacattcttcttttaaaaagcggacttaagctgtgggtgaatatgaaaaagggagaattgcatgatcccgaggacagaatgcgcgatgtctctgagaccggccactggggaaatggcgactatgaaattttcataaaagatgatgaacacattgaatatatcatgggattgatcaaacaatcctatgagaaaaataagtgagaacttccattgagaagttcttttttattgtggcatgctaaagaagaattcatttcagtccctttcttcttctgtaaaaatgaaatgtacaaactgacaaaagacctataaaatgagaaagctatcatgagagagcagaagggtgagagagacaatgagttataaattagttgcgatgcttttatcgatactattcctattatcggcgtgttctaatagcggatcttctgataaggatcaggaaaagcaagcagtgaagaaagcgagcgttgcgatgctgacggagcaggaagtaaaatcagctttgaaaaacgatattgattcgatctttaatgcatttgataaagcgggaaaagaaaacggctggagcacggcaaacaaggcggatttcaacaagctgcggcctagtgtgctgccttatgcaacagaaacgtttgcagatcagaccttaaaggatttggccggagagtactattgcgagtgtgatgatccttttcaacccggctctgatttcgatgtgcgttttacatatgaacaggacaagaataagatagaggcttcatcaatagacccggcaacagaattaaacaacatgggcacggaatggacgtttgaattgatgaagcaagacggtaattggaagatcaacaaatgggacagcaagtcgcttcaaggggatgatatcaagctgacaaaagaagaagcgaaaacgattctgtctagaaacggtgaaacggcggaatttgtgaagtcctatgaatcgaaggctgccggcggaacagcttatcttttcaatgtgaaaagttcaaatggggaaagacaggcggcgatcagctcaaaggataccagtctggtaagtgataatgaaaacgagactgaagctccggagcaagagacagctcagacgactgcggaaaccgcatcgcctgatacagcggatacacagagcagtgagcagacaacaggaagcacaaaagcagattatgttgccaaattgtcagcgacagaacagaaagaaaagcacaatgactatcaaagtgattatcagatgattgaggattacggttacaattatcaaatgtgggacggattgctgaacgagatatacggcgtgctgcaaaagcagctttctgccccagacatggcggcattaaaagtgaaacagcgccaatggataaaggatagggatgctgcagcccagaagcgatatgatgaggagggcggcggttcattatcccgagtcgtccaaacggaagagcttgccaaacagacgaaagagcgctgttacgagctggtgaatacgtatttgaaataagattgacatgggacccttgcataaagggttcttttttatgaaaaaaacaaattgacaggatgaaaaaacaatttcttccttctatattgttttcaaaatttgggattgatagaatatgacatatctcatagagaaggagggaagccgttgagtcaagccataccgtcttcgcgtgttggtgttaagattaatgaatggtataaaatgattcgccagttcagtgttccggatgctgaggttctgaaagcggaggttgagcaggacattcagcagatggaagaagaccaggatttgctgatctattattctctgatgtgttttcggcaccagctgatgcttgattatttggagccgggacaaacatacgggaatcgccctacagtgacagagcttcttgaaacgatcgagacccctcagaaaaaactcacaggccttttgaaatattactctttgtttttccgcggcatgtatgaatttgatcaaaaagaatatgtggaagcgatcgggtattatcgcgaggcggagaaagaactgccgattgtgtctgatgaaattgagaaagccgaattccattttaaagtggccgaagcgtattatcacatgaagcaaacccatgtgtcgatgcaccatattcttcaggccttggacatttatcaaaaccatcccctatacagcattagaacgatacaaagcttgtttgtgatcgccggcaactatgatgatttcaaacactatgataaagcgctcccgcatttagaggcggcgctagatttggcaatggacattcaaaatgacaggtttatcgccatttctctattgaacatcgcgaacagctatgacagatcaggagacgatcagatggctgtagaacatttccaaaaagcggcgaaagtaagcagagagaaagtgcctgatctgcttccgaaagtcttgtttggattaagctggacattatgtaaagcgggccaaacacagaaggcgtttcagttcatagaggaaggattagaccatatcacagcacgttctcacaaattttataaagaattgtttctgttcttgcaggccgtgtacaaggagactgttgatgaacgaaaaattcatgatcttttaagctatttcgaaaaaaagaacctgcacgcgtacattgaagcatgtgcccggagtgctgccgctgtttttgaaagcagctgtcactttgaacaagctgctaagttttaccggaaagtgctgaaagcccaagaagatattctaaaaggagagtgtttatatgcctattaagaaaaaagtgatgatgtgtctggctgttactttagttttcggaagcatgtcgtacccattcctgacaaactccggcggcgttaaggaatcaacagatcgaaatacgacgtatatcgatcattccccttacaaacttagtgatcagaagaaagcccttagctagggctttttcttgctttacggaagacgttccattttccacatcacggcattccttctatttctaacgcaagacactcgaaacaaccaaaccatttgaggtataatggataaagtgaataacagtatttagattgatatatatgaaagagagtggaacatcatgggccgtaagtggaacaatattaaagagaagaaggcgtctaaggacgcaaatacgagtcgaatttatgcgaagtttggccgtgagatttatgtggcggcgaaacagggcgagcctgatccggaatccaaccaggcgctgaaggttgtgcttgagcgtgcgaagacttacagcgtgccgaaaaacatcattgaacgtgcgatcgagaaggcgaagggcggagcggaagagaattacgatgagcttcgttatgagggcttcgggccgaacggatcaatgattatcgttgatgcgctgacgaataatgtaaaccgtacggcgccggaagtgcgtgcggcgttcgggaaaaacggcggaaacatgggtgtgagcggatctgttgcttacatgtttgacgcgacggctgtaatcggtgtggaaggcaaaacggctgacgaagcgcttgaaatcctgatggaagcggatgttgatgtacgtgacattttagaagaggatgacagcgtgatcgtatatgctgagcctgatcaattccatgcggtgcaagaggcgtttaaaaacgcgggtgtcgaggaatttacagtagcggagctgacaatgcttgcgcaaagtgaagtaacgcttccggatgatgcaaaggaacagtttgaaaaattaattgatgcattagaagatttggaagatgttcagcaggtatatcataacgttgatttaggtgagtaaggagtgagcaggctgttatggcctgctttttttgtcccggaaattgttttagctgtatgtaggcggccgcctatacgatctataagatattctcatactctggactgtaacctatgtgaaggagagagtgaatatgactgatacaagacatatgtatggcggacctggttttggtcattatcagggctttggtattggccacccgggttatggcatgtatggaggccacccgggctttggcatgtatggaggctacccagatcacggcatacatggaggtgtcggcggctatccgggatatggaacgtacggaggatacggaggatccggcggttacccaagcggcggctatggaggctctccgggaactgtaaattatccgaacatgcaccatgaaaatgatggccatcaccactattatcaccatcatcatgatggaaaagataatcttcatcaccatcatcatgatggtcattatggccaccatcaccaccatatgggccactggggaaaagacggttataaataaagaagatgatggtataaagaggacactcttgcagatcaagagtgttttttatcttttttcttgactgttcagtctggaaactggtaacatttgtttcaggaggtgatcgtcttttggggaggaataaagaatttgatacggcacttgttcttcacagggcgatagaggtttttggagagtatggctacgaaggaacgtctcttcaggatctgctctctcatttaggcattgcgcgccagagcttgtatgatacgtatggcacgaagcgtgatttatttttgtccgctgtgaaaacgtatcttgaagggaaaaacactgccgttatggaaaggcttgaagcgccaggatctgtaaaggaagccattcgtgatatttttcaagaaggtgtcaatgctctgagggaccctgaacgggcgaaggcgtgctatatcattaacagcgcgattgaacagattccgcatgaccctgagcttgccctgtattttgaaagacaatccaagcagcttgaggacgctttttatcaggcgcttttaagagcgaaggaccaaggagaattgaatggcgaagatactgatatatctgcgcttgcccggtacctgaatcaaagcaggctgtctctgacatttgttgcgaaagtgacggctgatatggatcggcttcaggaccatgttgacgtgagtttatcagtgcttgattaacatgtggtaaaggattctttgcccatgtatgtatttttcggactgaatagtctagaaataaaaatgaggtgatgatgaatgttgatgaatgaatttgaaaaagcatgtgaaacattgagaaagtttatggcttatatgcttgagaaggacatgaagagctggacggagctttgggatgagaatgctgtatttgagttcccttatgcgccggagggatcaccaaaaagaatagaaggaaaagcggccatttacgattatattaaggattatcctaagcagatccatctttcttcatttaccactccgacagtgtaccgttcagcagactcgaatacggtgattgcggagtttcaatgtgacggccatgtgattgagactggactgccttatcgccaaagctatatcagtgtcatcgaaacgagagacggccgcattgtgcgttatagggattattggaatccgcttgttgtaaaagaggcctttggaggatcatttttgcaaacagaggagagtgggaaatgatgaaacagaatccgattttaatcacgggcgggactggcacagtcggcagccgaatcgccagccgtttaataaagctgggatacagagtgcgtattgcaagccgaaaaaagggcgcgcttgcaagtgcggagtatgtgtattttgattggaaggatgcctccagttttacgcctgctctagaacaggtaaaagacatctatcttgttgctccggttggtgtacttgatccggctccctatgtgcttccctttttaaaggaagcaaagcgtctcggcgcaaagcgggtagtgatgcaaagtgcgtctgttgtctccgagaacggtcccgtgtttggcgcgcttcaccaggcagtgcgcgagtttccagaatggacggtgctgcggccctcatactttatgcaaaatttcatcaatgtccagcaccgcatgtctattcaaacggaggggcgcatcacaacggcttcgggtgaaggaaaacttgggtttattgacgctgatgacatcgcagaaacagccgtcagggctttgattgatgatgttcctcatcaaacacatcatattctgacaggtcccgaggcgctgagctatgccgaagcggcggagatcattggagctgcggcgggacgccgggtggagcatgtcagcatttctcgttccgagctgcagcataaaatggaggcaggaggtttgcccgcggattatgcccattttatggcgaagcttgatgaggcaatcagccatggtgcggaacatcgggtaacggatacagtgaagcatgtgacgggaaaagaacctcgttcgctgtcagagtttgcggctgctcatgctgcatattggaaacactgacctcattttggactgaatagtctagaaagaccttcggcgcttccgaaggtcttcttattgaaaaagctaagtcgtgttttagtcataatcatgcctcctgcctcatacctattaaggtcattgtttttgagaaaggaggagccggaatgaaggatatgcagccgtttacgcctgtcaaatcatatacgccctttcacagccgttttgatccctgtccgcccatagggaagaaatattacagaacgccccctaacctttatatgacctttcagcctgagcatatggagcagttttcgccgatggaggctttgaggaaaggcaccctttggaaggatctctatgatttttatgaaaacccttatcgagggggagacgcacatggcaaaaaaggttgacgccgaatattatcgtcagcttgagcaaatacaggctgctgattttgtgcttgttgagctgagtctttatttaaatacacatcctcatgatgaagatgcgctgaagcaattcaatcaatattccggctattcaaggcacttaaaaagacagttcgaatcctcttacggaccgcttctgcagttcggcaacagccccgcgggcaaggattgggattggggaaaagggccatggccgtggcaagtataaggaggaatgcctgaatgtgggtgtatgaaaagaagctgcaataccctgtcaaggtcagtacgtgcaacccgacgctggcgaagtatttgattgaacagtatggcggagcggacggcgagctggccgcggctctccggtatttgaaccagcgttatacgattcctgataaggtcatcggccttttaacagatatcggtacggaggagtttgcccatttggaaatgattgcgaccatggtctataagttaacaaaagacgccacaccggagcagctgcgtgaagccgggcttggcgatcattacgtcaatcacgacagcgcgcttttttatcataatgcggcgggcgtgccgtttaccgcgagctatatccaagcgaagggcgatccgattgccgatttatacgaagatattgccgcagaagaaaaggcgcgggcgacgtatcaatggctgattgatatttcggatgatcctgatttaaacgattccctgcgttttttgcgtgagcgtgaaatcgtacactctatgcgcttcagagaagcggttgaaattttaaaagaagaacgggataaaaagaagattttctaataggcagattggcctctctttcatacacccttttacatacagagaaaatggtctgtttttgcagtttggtctgcattataatcaagggtgtgtaagcttactttttgattgggaggcctttatgtcagcttttaagattgagaacgaaacgattgcagatggattttacgcgtgtccggccgtctatgaggatgcagaatcgattaccgggttgctcgtccgaacagctgaatggctccgggatcggggttctaaccaatggagcggacttctcaaagggcaagatatacatgatatcacggggtcaattgaaaagggacatgtgtttgtgtttaaaaaagatgaagagcttgcggctgtcgtgatgctgctgcctgcaccgagcgagtgggaccggaagctttggggagacgatgggcatgaggagtccatttatttgcatcgcctcgcagtaagccgccggtttgcgggacaggggcttggagcccgcgtccttcagtgggcggagacgggcatacactttccgggaaaaacacggatccggcttgactgtgtcgctgataacgacgccctgcattccttttatcggcgtatgggatatgaattcatgggtgctgatgcgtccggatatcatttgtttgagaaagagattacggcagaataagcgtcctttgcagggggcttttttgtcttttctaaaagggagggcaggcgatgttgtggccaattttatttgtgacagggattgtgacggcttgtctgtttgctggcgtatccgttttgatgcggatgagatttcctgacaaaagtcggccggaatggatgttggccgggctgatcgtccttggtgtgtttgcgatctggtacagcctcgtgtatgtacgcggctgggaaggggctgcgctcggaatgcttggattcaatgtcattttcggagccattgccggatatttgatcgataaggccatccggcgttacaggaaaagataaggctgctgccgtctctcatcatgtcgaaattttcacagaccggcaggaattttctttcgaaaggagaaatacatattactttaaaatgaaagcgttttccaaagcgggaaggtgatgttgatgatacacagtgtgacaaatgggctgaatcgtttttgtacgtgggtgatgagactggcctatttgaatgtgctttggattttgttttctcttgcaggcctggttgtgtttgggctgatgcccgctactgccgcgatgtttacagtggcgagagaatgggcgaaggggaatacagatgccccggtgttttctgtcttttttcgggcgtttaaaaaggaatggcgggcatcacagatcctcgggcttatcgttgtgacggctgccctgtttctgtttgcggatatgcggatagcggctcagatggaccagcctgtgctcgtcaatgtattcctgagcattagtttgattttcgcgtttgttgtgctgtatgtgttcccggtattttctcattttgacgtaaaaatcagagaggtgctgagcatcagctttttcattgccttcagccgtccggcggtgacgcttttgatggcggcgggcgctgtcggtgtgctttgtctcgttctgtttcatgtcacgtttctattgtttttcagcgggagtttactcagcctgatcttaacgaagctgtcctttaaagcgtttcggtcaatggatcagcggcaggagaaagaaaaggcggcatgaagaaaagagttgctggctggtacaggcggatgaagattaaggataagctgtttgtgtttctatcgttgattatggccgtatcctttctgtttgtatacagcggggtccagtatgcctttcatgtgtatgatgagcagatttaccgcaagtcctcggaggtgcttcggatgtcttctgaaaggatcgaagacgagctgaagaagatagaggatgtgtcatatgaaatcattacggacgaacagattcagcgcatcctgagcatgcaaaatcgcgatgatacgtacgatcagtatcaaatgaagcaggagctgtgggatcagctggcgggatatgccagcgatgaaaagtacatcgattccattcatgtgattgatgcccgcggctcagagtattcagccggaagcagttcttcagatcttttgcagcaggagcaggaagaggtatttaagcgagcgaaagcgaaaaatggaagaaatctttggatgacgctcggcgggtcagatcctgtcctgatttcagcacggcagatcaggtcctatcaccagctgagtttgaacggcttgggcatggtgctgatccaggtcaatgtaaaacagatgattcgtgatgtgccgaaggattggggcgattcagtcggagacattatgattgctgaccaaggcgggaatttggtgtatacggcacatgcatcagcgcatgttcctgaggcagcaaaagagacgctgaagcaccccggttatgacttgataaaaaagaatggcaaacgttactttatttcttatcttcaatcatcctaccaaaattggagctactataacgttatcccctttgatcagatgttcgcgaaaatttcctttatgaaaacagtgatcggcacatgctttctcctctttttctgtgtggttttgcttttcggaaggaaaatcgccaacagcatcacggagccgattgaacagcttgtgaccgcgatgaaatcggtacagcacggcggcattgaagcaggtgtgtcgctttctctgccggaacatacacaggatgaggccggcatgctgaaccgtcattttactgtcatgatgaaacggattaatgagctgatggaagaaaatgtggaaaaacagctcatcattaaagaaaccgaattgaaagcactgcaagcccagatcaatccgcattttttatataacacgctcgagtccatcaattggctggccaaggcgaatcagcaaaagcaaatctcaaaaatggtggaatcgctcggttttcttctgagaaacagcatacatatgaaaaaggatatcgtgaccatacaggaggaggcggacattttacgtcactatatgaccattcagcgatttcgatttgaagagcgcctgaatttcacgttggatattgacgatgaggtgaagcattgcctcattccgaaactgacgctccagccgcttgcggaaaatgcgattcaatacgcgcttgaaccctttacaaggccatgcgccatccggattcaggcgaaaaaggcaaaggaatgtgtctgtattacggtcgaagataacggccctggcatggatggacggattcttgaatcaacgggcggaagaggaatcggactttggaatattcgcgagcgcatcagcctgacattcggagagccatacggcttgcggattcatagtgagcatgaaaaggggacgaggattgtgatcacaataccgtgccgaaatgaggtggtgtgatgtataaaatactgctggctgatgatgagaggattatccttgatggaatggcaggaatcattgagtgggagtcgcttggcgcctcattgatcggtaaagcgcagaacggacatgaagcatatgaaaagattgtacataagcagccgcatatcgtcatcacagacgtcaaaatgcccggcatggacgggcttgagttgatcaaaaaggtgtcagccatcagtccgtcggtgcaatttatcgtcctgtccgggtttggagagtttgagtacgcaaaggaagccatgaaatatggggtgaagcattatttgctgaaaccctgcaatgaacagcagattatcagctcgctggaggaaatcattgctgagctgaagcggcaagatgtgcacaaaaagaaaacagcccatctgaaacacgagctggaccatatccgttcctttgcagccgatcaatacttggaaggcttgatcgcaggtgtagcccagttgtctccgccgccttcacttgccggaaaaaagatccgcctcttgatcttaaaaggggaacaatctattgatgccacaaccagagaggcactcggatcggcactgacagcggtttgcagcagcggagaatggacagtgctcgccgtagaggagaacgccgctgaaaaggcggcggaggtttttgcggaccgcaagatggccatcagtcaggcgggagaactccggcacgcggggcagctgtttcgtgacacagctgaagcgtctggtgacctgcatgggagcgcagtgatttcaaaaatgatcaggcttattgccgacgagctcggaaatccgaatctgtccttaaaatgggcggcgaaggatatgctgtttatgaatcctgattatctcgggaagttatttaagcaggaaacaggcgagaaattttcacaatatgttacacgagtgcgtcttgaacatgcgataaaacagatgaaaatgaggcgggatgcgagtgtatcagaaattgctgaagaaatcgggtttggcgataatccgaagtatttcagtcttgtttttaaaaaatataccggtctgacaccgtcagaattcagaagaaaacagggaggcgcttccgcaggatagccatctctgtttttttgactttcgccactgttttttgagtgtttcgccctatccgaacgctttaaaataaaatgtaagcacttacattaaaaggggggattggtttgaagaagatttgttacgttctgttatcgcttgtctgtgtctttattttcagcgggtgttctgtgggcgaagaggcctcggggaaaaaagaagacattacgctcagaatcgcgtggtggggcgggcagccaaggcatgattatacgacaaaggtaattgaactttacgagaaaaagaatccgcacgtccatattgaagcggaatttgcgaactgggatgactactggaaaaagcttgcgcccatgtctgccgccggccagcttcctgatgtcatccaaatggataccgcttacttagcccaatacggaaagaagaaccagctggaggatttaacgccgtatacaaaggatggaacgattgacgtcagctcaatcgacgagaatatgctgtcgggcggaaaaatcgacaataagctttatggatttacgctaggtgtcaacgtgctgtctgtgattgccaatgaagatttgctgaaaaaagccggtgtgtctatcaatcaggaaaactggacgtgggaggattacgagaagctggcgtatgatcttcaggaaaaagccggtgtctacggttccaacggaatgcatccgcctgatattttcttcccttattatttgcgcacaaagggtgagcgcttttataaagaagacggcactggcctcgcgtatcaagatgatcagctgtttgtcgattactttgaacggcagctgaggctggtgaaagcgaaaacgtccccaacacctgatgaaagcgcacagattaaagggatggaagacgattttatcgtcaaaggcaagtcagcgattacatggaactactccaatcaatatttgggctttgcccggctgacagactcgccgctgtctctctatctgccgccggagcaaatgaaggaaaaggcgctgacattgaagccgagtatgctgttttccattccgaaaagctctgagcataaaaaagaggcagcgaaatttattaatttcttcgtgaataatgaggaagcgaaccagctgattaaaggcgagcgaggcgttccagtctccgacaaggtggcggatgcgattaaaccgaagctgaatgaggaagaagccaacatcgtggagtatgtagaaaccgcgtcaaaaaacatcagcaaagccgatccgccagagcctgtgggaagcgcggaggtcatcaagctgctgaaggatacgtcagatcagattctgtatcagaaggtatcgccggaaaaagccgccaaaacgttccgaaaaaaggccaatgagatattagagaggaataattgacgggaatggggctgacgcaatgaaaaaaagccggagtataagaaaagacaatctggcgggatatgcttttatttctccgtttatcatcgggttcctatgctttacggtgatcccgatgggggcgtccctgtttctgtccttcacgagctatgacttgtttacggcgccgaaatggatcgggctcgacaactttaaggaaatgtttacgggtgacgaaaagtattggcagtctctgaaggtgacgtttacgtatgtgcttgccggggttccgctccgtctcggcttcgcgctttttatcgctgtcattttaaacaatgcagcaaaaggaacggccatttacagaacgctcttttatctgccttcgatcatcggcggaagcgtcgccgtggcgattatgtggcgcaatatttttggcaatgacggggtcatcaatgcgctgctgttttttgtcgggattgaccaaaaaattctttggtaccagaatccgacaagtgcgctgtggacattgattctgctgtccgtctggcagttcgggtcgtcaatgctcatttttctggccgggctgaaaaacattccgtcttcgtatttggaagcggcaagtgtggatggggcaaatcgggtgcagcgtttcttcaagatcacgcttccgatcctcacaccgattattttctttaacctagtgatgcagacgatttctgcttttatgacatttacacctgcctatatcatttcgaagggcgagggcgggccgcttgacgggacacttctctattcgctctatttgttccagcgtgcgtttaactattttcaaatgggctacgcatcggcgatggcgtgggtcatgcttgtcattgtcgggctgattacgctcatattgtttaaaacatcgtcatattgggttcattacgagtcaaaggaggaatgacggatggagccggtcaacgagcctgtcagaaaagccccggtttttgaaagaaaaaaagccgggcgcgtcagtcccaaacgcatactgttccatgtttttacagcaacgctggcggtgttactgctgtacccggttatttggctgtttgtcagctcgtttaaagaaagcgccagtatttttacaacctcacattctctcattcccgacccttttattctcagtaactatgctgaagggtggaagggtatcgcgggacagccgtttctgacgtttattaaaaactcggcgatcattgtcggactgtcaacaatcggtgccgtcctgtcatcggctgtcattgcgtatggatttgcgcgtattccgtttaagggaaaaaaattttggtttgcgtgcatgatggggacgttaatgctgcctcatgaagtgttgatgattccgcagtatattatgtttgcgaaattagactggctgaattcctttaaaccaattgtcgttccgcaatttttcgggcatgcgttttttatatttctgatgatccagtttatccggacgattcccgaggagctggatgaagccgcgcgaatcgacggatgcgggcgctttgcctgcttttggcgaatcattctcccgctgattgcccccgcgcttgcgacgtctgcgattttctccttctattggaagtgggaggagctgattcaaccgcttttgtatttgaataagccggagctttaccctgtttcacttgcgctgaagctttttctcgatacagagtcggcttcgaactggggcgcgatgtttgccatgtcggccgtctcgttattgcctgtgattcttgtattctttttgtttcagaaatatatcgttcagggcatcagtacgaccggattaaaataaaaaggagtgttgcagatggcacagcttatctttgatgaagaaaaggtgacgtcggttattgaccggatcgtgaaacggacatttcagatggattttgcgtgggattggccgggcggcgtcgcgttttacggtgtggcggaggcctatgaagcgacggaaaacgaggaatatatcaatctgttaaaaacgtgggtggatgaacagctggaggatgggctgccgccgctttcgatcaacggagtttccattgggcatacgcttttgttcctccacaaggtgacaggtgatgacgtgtatttggaaacagcggccgagatggcggaatatgtgctgcataaggcgccgcgctttggcgagggtatccttcagcatacggtgaatgcggcagaatacgtattccctgaacaggcatgggcggatacgctgatgatggctgggctgtttatgctgagaatcgggcggatcatggagcgtgaggattattttgaagacggtctgcgccagtttcacggacatgaggatgtgcttcaggaccctgtcacgaatttgtactaccacgcctgggacaacaaagcgcaaaatcatctgtcggggatttattggggcagagcgaacggctgggcggcactcacgatggcaaaggcgctcccccttattgaggtgacacatccttcctttatgatcatcgacggatcgctcagagaccagctgagcgcgcttgtccggcttcaggatgaatcagggctgtggcatacgattttggatgatccggattcttatctggaggtttcggcatcagcgggtattgcttctgctctgatgtcgagcggaaagctgtatacaaaatatgtgcagaaatcgcttgccgccattttggatgcggtggaagaggacggacgggtcagcaaggtatcggccgggacagccgtcatgaaaaatgccgaaggatacaaacaggtgccttacaaacgaatacaaggatgggggcagggacttgcgctgacgtttcttgctgatgttttgaaaacgaaaaaacgcgtgtatcagtaaagacagcggcggggggaaagggatgaaaaaacagcctcaacagaaggaacgggtttctcgctggaagggaaggtatttcaaaagaaactttgtcttcattttgctgattgcctgtattcccggattgctgactggcggcgcaatctactttctttcgatcgacaaggtggagaaagagctgcagagatcgcatgaaacacaggtggcgcgtgaggtcagccgaatggatgagaagctgggagtgcttgaactggcactcacccagatggcctacgattcttcactgatgaacggattggccgagagggatttggagaaagactttacgttctcctatcaattaacgaaaaaactgtttcttttgcgggaccagcagccgctgatcgagcaggcttccatctttctgaacagcccccggccacttgtgctgagccctgaatacagcgctttgacagaacaggaggcgcttcgcaagtatcgctcgctacttgcctcagaccacagcatttattggaaacggtcgggaaatcaagcgatgctgatccagctcattccgggcgcggctgagaaaccgttcggcgcgatcatgctggcggttgatccgaaagaaatggaatcaatcctgcaaagcttgtccccctatcctgatggcagtgcgctgcttttagatcaaaatcaagaggtgctgtttcatgaaggggaaaaagattttaaaaagactttacttcaagagataaaaaaacagcctgctgagaaaggtcatattcagatggaatgggaaggcaaggtgtattctgtctcctttggagaaatgaaccggatgcatcagcaatggacctttgtgtcagcggcgcctctttcagctattacagcgccgatggtgtttttatcaaaagtgatcatcgtgatgctggtcatttgcatcggtttggcggtatgcatgacatggtatgcatcaaaaaaaatctatcgtcccattcagcatttgcttggcttgtttaccggtggagagaagaaagtatggcaggcgtccgggcaggatgaattcaagtggattgaaaagagatggcaggatctatcccttgaaagccggaagctccaagagcagctcctgcggcagacgccccatatgaaaaagagttttttgcagcacctcttgcagggggatttttactatgacaacgaggacagtctcagatctcggatggaggaggccggctggaacatcggcgaaaacgtgtttcatgtgctggatcttcaattgacaggactccgctgtgaaaaaagcatcttctgttgcgatgatgaacagctcgctgtgtttacactgactaatatcgctgaggaattggcggataaacgcgtttttcagctctccatacttgatatcggccggctttctgtcaccgttcttgtgatgaaaacaaacagctctgatctgaaggcgtatataacggagctggcacgccaatttggagatgtaaccggactatgcctgacctcgacattgagcagcaagacggagcgtgtcacggaaattccttctttatttcaggatgtgaaatgcggcaaatcccgcaggaagtttgctaaccgggatcaggtcattgatttgcaggccgacttccctcaggatgagcagttcgctccttattacccttttgagctggaaaaacaaattgttcaggccatccggctggaaagaaaacaggaagccgaggaactgatagatggatgtatgagggaactggcggaaaaggcggccatagacaggcatgtgcattccgccctgattcagctgttttcccgcattcaggaggatattttgcattccgggctcaatcctagcgaactgtttcagcatcggaacccgtttcttgatatttcagaattgcgcgaacctaatgaagcggcggcctggctgatggatgtagtggtgacgccttacctttccaagcttgagggcagaaaaaacagacagcaaaagcagctggcagaacgtgtgattgcgatgattcacgaacagtatatggcggatatttcattggaaagctgtgccgatgcgcttggcatgaattcatatacgttaagcaaggcatttaagcaagtgaccggcattaattttatcgattatgtgacccagatcagaatcgaaaaggcgaaagaattgctggtcaatacgaataaaaaaattcatgacgtgtcagaagaagtcggttaccgccacaattactttaaccggatttttaaaaaacaggtcggcatgccgccgggtgtcttcaggcaaatgtatcaggaaacgccgtgaaaggagagaacatgtgatgaagaaaccgattcaagtatttttagcgggagattccactgtgagtgactgcccgcctcatgaagcgccgatggcggggtgggggcaggtattcgggcaattgttttctgaagaggtagtggtgcacaatcatgccaaaggaggagcgagcaccaattcttttgtggaggaaggaaggcttcaagcaattgccgaacgcatcacacaaggcgattatctgttgattcaattcggccacaatgaccaaaaaccgcgggggacgaagccgtactccacgtttcagcaatttctcaccctgtttgcagatacggcacgcgaaaagggcgcgcatcctgtgttcgtcacatcggtgcagcgccgccgcttcgatgaaaacggacgaatcgagcattccctcggtgagtatcccgatgcgatgaaagcactggcgaaggagctcgatgtacctgtgattgatctgcttgcgaaaacaaaggtgctgtatgaagcatacgggccggaggagtcgaagcgattgttcgtttggtttcagccgaatgaacatccgaattacccggacggcattgaggacaatacgcatttttcggaagaaggtgcaatggaggttgcgaagcttgtggcagaaggccttgaagagatcggacttccgcttaaggaccaccttgtgagccgggagggaaaagaacatgtataaggaaggcacttgcttgtaccgcaatccgctccggtctaaaagcgatgtgaaggactggcggatggagggaggcgggcagatctcatttgacgatcacagcttgcacctgtcacatgtccaggatgaagcgcactttgtcttttggtgtccggaaacctttccagacggcatcattgtgacatgggatttctctccgattgagcagcctggactgtgtatgctgtttttttctgctgcgggaatgggaggcgaggatttgtttgatccaagtctccagaaaagaacgggaaaataccccgagtatcattcgggggacatcaatgcgctccacctgtcgtatttccgcagaaaatacgcggaggaaagagcgttccgcacctgcaatttaagaaaaagccgcggtttccacctcgccgcaatgggggccgatccgctgccttctccagacgacgctgattctccgtatcgtatgaagctgatcaaagacaaaggctatgtgcacttttcaatcaatggtctgcccattcttgagtggatggacgacggcagcacatatgggcctgtgttaacaaaaggaaaaatcgggttccggcagatggcccccatgaaagcagcttacagggattttgtcgtgcatcaagcggtgagaagatgaagacgactgtaacggatgcgctttatgcaggctgcgaagcggtggtgaaaatagcatggctcaacgggctgtggctgttgtttacacttttgggcggcgttcttttcggatgggcgccgagcacagccgcgatgtgtgccgttataaggaaatggctgatggggcaaaaggatgtcccgatatttccgttatttctcgatacctataaaaaagagtttctcaaggttaatgcgatcggattggcgttttgggctcttttgctcatattgtccgcgaactatcattatttttctgccagtacggattggctgtcctttgccgtaacaagctgcacgctgcttgcagggcttttgtatatcatcgcgctgatgtatgtgtttcccctttatgtgcattaccagctcccgcttcgcaaatatataccgcaggcactgctatttggcgccatgaggccgctgacaactggctgtatgctgatcgggtgcggatttgtcctttatttgctttatacgcttcctggcctgatcccattttacggcccgtgtttatttgggcttgtgttgatgttttttgctcttaggggatttcaaaagacggaggcccagcaccatcaagccgggtaacaaaaaaatgacaaatacgcaaaaaagtgcagtgtccgaaataggcagatgcaaaaaagtgaaattgaagacagctcacacagcgcataaaatccaatttaagtaagcgcttacaaataaatgagaaggagctgtctgatgattacacgaaggaaacgcatgtttaccgctgttacgttgctggtcttgttggtgatgggaacctctgtatgtcctgtgaaagctgaaggggcagcgcggcagatggaagcgctgaaccgggggcttgtagcggtcaagacggacgggggcatttttgtcagctggcggtttcttggaactgaaaacgcatctgttttgttcaatgtgtacagagacgggcaaaaactgaatgctgcgcctgtcaaaaccacgaactatgtggataaaaacggttcggcgggctcaacgtatacggttcgggctgttgtaaacggtaccgaacagccggcttctgaaaaagcctccgtatgggcgcagccgtatcattccgtcccgctggataaaccggctggcggcacgacgccaaagggtgaagcttacacgtacagcgctaatgacgcaagtgttggcgatgtggatggtgacgggcaatacgagctgattctgaaatgggacccgtctaactcaaaagacaattcacaggatggctatacgggtgacgtgctggttgacgcgtataaactggatggcacaaagttatggcggatcaatctcggcaaaaacatcagagcgggcgcgcactacacccagtttatggtgtatgaccttgatggtgacggaaaagcggaagtggcaatgaaaacggcagacgggacaaaagacggcacgggaaaagtaattggaaatgccaatgctgattacagaaatgaacaggggcgtgtgctttcaggccctgaatatctcactgtgtttcaaggttcaaccgggaaagagcttgtcaccgcaaattttgaaccggcgcgcggcaatgtgtcggattggggagacagctacggcaaccgtgttgaccgttttctcgccggcattgcctaccttgatggacagcggccgagcctgatcatgaccagagggtattacgctaaaaccatgctagttgcctataacttcagggatggaaagctgtcaaagctttggacgctggactcctcaaagtcaggaaatgaagcgtttgccggacaggggaatcacaacctgagcatcgcggacgttgacggggatggaaaagatgagattattttcggctcaatggctgttgatcatgacgggaaaggcatgtactcgaccggcttaggccatggggatgccctccatacaggagatcttgatccgggccggccggggcttgaggtgtttcaagttcatgaggacaaaaatgcaaaatacggcttatctttccgggatgctgcaaccggaaaaatcctttggggcgtttatgccggcaaggatgtaggccggggaatggctgctgatattgacccgcgttatccgggacaggaagtgtgggcaaacggttctctctactcagcgaaaggagtcaaaatcggaagcggggctccgtcctcgaccaacttcggcatctggtgggacggcgatctgctgcgggaacagctggacagcaaccgaattgataagtgggattatcaaaacggcgtatcgaaaaatgtgctgactgcatcaggcgcagcggctaacaacggcacaaaagcaacaccaacgcttcaggctgatctgctcggtgactggcgcgaggaagtggtgtggagaacggaggacagcagtgcactgcgcatttacacgacgaccattccgactgagcacaggctgtatacgctgatacacgatccggtgtaccggcttggcatcgcctggcaaaatgtcgcctataaccagccgccgcacacaagcttctttttaggagacggcatggcggaacagccaaaaccaaatatgtatacgccttaactgaaagggggaaggaacgggctgcgcgcagcccgttcccattaaaatgaaaccaaaaaagaggcaaatggaatacctgaccagaggtttgattgcggtaaagacagaacagggcgtgtttgtcagctggcgttttctcggcacggatcatgagacgacggcttttcacctttatcgggatggaaagcggatcacccgcgatccaatcgatgaaagcactaattttctcgatcaaaatggaacggctgactctgtttatcaagtggcggctgtcaataaaggacgggaagaaaagctttccaaggaagctcgtgtttggcaggaaaatgtcctggaggttccgcttgccaaaccggaaggcggtgtggcgccggacggaaagccgtacacttacagcgccaatgatgccagtgtcggggatatagacggggatggagaatatgaaatgatcctgaagtgggacccatccaattcaaaagacaacgctcatgacggttataccggggaggtgctcatagatgcctataaactggacggcacctttttgtggcgcatcaacctcggcagaaacatcagagcgggcgctcattacacgcaatttatggtgtatgaccttgacggtgacggaaaagcagaaatcgccatgaaaacagctgacggcacaacagacgggaaaggacatatcatcggtgatgagcatgccgattttagaaatgaacagggaaggattctgtccggaccggaatatttgacggtgtttaaaggagaaaccggtgaggcgctcacgaccgtggaatatgaaccgccccgcggcaaactggaggattggggagacggctatggaaatcggatggaccgttttctcgccgggatcgcttatttggatggggagcggccgagcctcgtgatggcgcggggctattatacgagagccgttctcgtagcatacgatttcagaaacggaaggctcaaaaaacgctggctatttgactccaaccagcagggccatgaagcgtacgcaggacaggggaaccacagcttgagcgtggcagacgttgacggagacggaaaagatgaaatcatatacggcgcaatggctgtcgatcatgacggaaccggcctgtactcaacggggctcgggcacggagacgcgatgcatgtaggggatctggacccgtcacgaaaagggcttgaagtgtttcaggtgcatgaggacgccacgaagccgtacggactgtcactgcgagatgccggaaccggtgagatattatggggcgtccatgctggaactgacgttggccggggcatggcagctcatattgatccaagctacaaagggtcgctcgtctggggaattgatccgccgggcaatgatggcatgtcgtatgggcttttcacgagcaaaggcgaaaaaatcagcgacaaagcgcccgcttcagccaatttcgccatctggtgggacggtgatttggtcagagaactgcttgatcatgactgggacggaacgattggcaggccaaagattgaaaaatgggatgctgaaaacggctgtctgaagacgatatttcagccggccggcgtgctgtccaacaacggcacgaaaggaaacccggttcttcaggccaacctgttcggagactggcgggaagaagtgatatggagaacggaagacagcagcgcgctccgtatctatacaacgacacatctcacccgccaccgcttttacacgctgatgcatgatccggtttacaggctcggcatcgcctggcagaataccgcctacaaccagccgccgcacacgagcttttacctcggaacgggaatgaaaaaaccgccgaagcccgccctgtacatagcgggaagtaaagcggaggcgccgctgtaggaggactaagggataagacgcaaaggctgaacgctacgacaagatgattaacgaacgggcaggacgaaccaatgctcaagcgctgtacgcaccggtctttttcaagggaagagctatccgtgatggaagctgtataaaaaacgaggaggaatgaaaaaatggcaaatcatatttatcttgccggcgattcgactgttcaaacgtatggagacagcacaaatcaagggggctgggggcagtttctcggctcgcatctgccggagcatattcaagtgatcaacagagcgatcgggggaagaagctcgaaaacatttgtggaagagggcaggcttcaggcaatcctcgatgtgattgagccggatgattggctgttcgtgcagatgggccataatgacgcgtcaaaaaataagccggagcgctacaccgagccctatactacttataaacaatatttaaagcagtatatcgcaggcgcgcgggaaaaaggcgcccatccgcttctcattacccccgtagcccgctttcattacgaaaacggcgtgtttttgaacgattttcctgattactgcattgccatgaagcagacggctgaagaggagaatgtccagctcattgatctgatggagaaaagtctcgctttctttactgagaagggcgaggaaaaagtgtacacctattttatgatttcagaagggattaacgattacacgcattttacaaaaaaaggcgcaaatgaaatggcgaaacttgtggcaaaaggcataaaggagctcggcctgccattgacagaatcgatcatcaaagaaaggtgaaaatgggatgagaaaactgtatcatggcgcttgctattatccggaattatgggatgaagagacgattcagcaggacattgacatcatgcgtgaagttggcgtaaatgttgtgcggatcggcgaatttgcctggtctgtcatggaacctgaagaaggaaaaattgacgtcggttttttcaaagaaatcatcgcccggctgtatgatagcgggatcgaaacgattatgtgcacgccgacgcctaccccgccgatttggttctcacatggccggcccgaacgcatgcatgccaatgaaaaaagagagatcatggggcatggctcccgtcagcatgcctgtacgaacaacccgtatttccgaaaaaaagccgccatcatcaccacagccatcgccaaggagcttggccggctcccggggctgatcggatggcagctagacaatgagtttaaatgccatgttgcagaatgcatgtgtgagacatgcttgcgcctatggcatgactggctcaaaaatcgctacggggtaattgagcgcttgaatgaagcttggggaaccgatgtgtggagcgagacctatcagacgtttgagcaagtcccgcagccgggaccggccccgtttctgcatcatgcctctctacgcactatgtatcagctgttttcgatggagatgatcgcttcgtttgcggatgaacaggccaaaatcatccgctgctattcagatgcgccgatcacgcataacggatcagtcatgttcagcgtggacaatgagcgaatgtttcagaatctggattttgcctcctatgacacgtacgcttcgcaggaaaacgcctctgcctttttattgaactgtgatttatggagaaatctgaaacaagggcgcccgttttggattttggaaacgagtccgtcgtatgccgcctcgcttgaaagctccgcttacccgcacgcagacgggtatttgcaggccgaagccgtatcgtcctacgccttagggagccaggggttttgctactggctatggcgacagcaacgttcaggcagcgagatttcccacggttcggttctcagtgcctggggcgaacccaccatcggctatcaaaaggtgctggcggttgagcgggcaagaaaggaaatcgagcctattattctatcgactgaacccgttcaagccgaggcggcgatgacttactctgacagagcaaaagcatttattaaaactgagcctcaccggggactccggcatcgttcgcttgtgacgcatttttatgaacgtattctcaacacggggattcaccgtgaccttattccggaaggcgctccactggacggctatcgcttgctgtttacgccatttgtgccgtatttgtcttctgaatttatcaaaaaagcttcggcattcgctgaagcgggcggcatctggatcaccgggccgctgacaggagggcgcacatgcgagcataccattcataccgattgcggacttggcgaacttgagaaaacgtcagggatcaaaacactttttacctttccgatgaatgagaacgtgaatacaggaaaagcgtttggcatcacggcgccactcggactatggagcgcggtgtttgacacagagagcggaaacacccttggcacggttgaatcaggaccgggggcgggccatgcttttctgacggaacagaattacggcgaggggaaaattgtcatgctgggatcgcttccatccgggaaagaaggggatgcgatgctggaagcgctcgtcaggcattatgcggaggaagctgttatttccagccggtcggatgtgacgcccggcacgatcgttgccccgcgcaaaggcgaaaacggccttgtgtggatcgttgtgaatatggatggaaaaggaggaagtgtgacactgccggaagcgggaacagatctgttgacgcaccgcttggaaaaggcggggaggctggcggtcggaccgcatgaataccgtgtgattcaatttgacaatcacagctgattctttgcatcgaatcagcttttttctatggagggagagaccgatgaaaaagatcaaatggttatcaggacagccaaaggtgataagtggtgtgacgtggggcgtgccatggaaaaaaggagaattaaaaaagggtgaccgtctggcgcttatgaatgaaaacgcggaaatgcgatatgtgcaaagcgaaccgttggcctattggccggatgggagcatcaagtggacgaagcacgcggcggtgtttggtggtcagagaaaccaaatatttacagttcgcaaaagagaagtgccgcagccaactgaatcgctcagcattcatgagacagagcatgatatccaagtgaatacaggagcactcgtttgtaccattcataaaaaaggatctgatttcattcaatcattgcagatcaatggaaagccgatcgccgcaggcgggaggctcgttgcgataagagaaacgagaaaggagtcggcggcggaaacggttcttttgcatgaaaggtctgtcagctttatcaaacgggcggcgattgagcagagtggtcctgtcaaagcagtagtcaaaatcgagggagtgcatgtgctccataaaacgtatgaggaatggctgccgtttgtcatccgattaacgttttatgccgggctgtctgagatcggccttgtgcacacgcagctgattgacaggagcggtaaacaagaattcataaaggggctcggcatcgaattcgacctttttttggagggagagccgtacaaccgccatttccgctttgcgggagagaaagggatgtacaaagaacccgcccagctgtttggcacacgtaaattcaatgaacgatatccgctttatgaaaaacaaatcaatggcgaaatgctgtctccagatgaagagcataaggaatggtttgcacatggcacacagaatgtggtttgggacgatgtcaagcttgtgcaagattccagcgatcattacagcctgtcaaaacggaccggaaaagattatgcgtgggttggaatgctgcatggcagccgggcgaaggggctctgctatgcgggcggaaaaaatggcggtgtggctctcggcctgcggtatttctttgagaaatatccttcagcactggaaatcacaggtcttgccggcagccgccccaaaatgactatctggctttggcctccggacggcgaagcgatggatttgcggcattatacaggaaacacccacgtggccagcgcgtatgaaggatttgatgaaatgcgctctgatccgacaggcattgcgaacacaaatgaaatcagcctggcgtgcttttcgcacatgccgtctgacgaagtccttaatgcactcgctgacaaatggcaggcgccgccgctcttgatatgtgagccaaacgtctattacgaatcaaaagcgctcggggtttggagcatcattgacacatcccatccgctcaaaaaagagctggaggaacagcttgacgccgcctttctgttttataaaaaggaagtagagcagcgcaaatggtacggtttttggcattatggcgatgtcatgcatacgtatgacccgatccggcatatgtggcggtacgatctcggcggatacgcatggcaaaacaatgagctcgttccgaccttatggctgtggcaggcgtttttccgctcaggcagagaggatatctttcgcatggcagaagccatgacccgccatacgagcgaaacggacagctttcacctcggtgaatacgcaggacttggttcacggcataacgttgtgcactgggggtgcggctgcaaggaagcgagaatcagcatggccgggctttataaattctattattatctgacgggtgatgagcggacgggagatcttttgacagaagtgaaggatgccgattatgccctcgtcaaaaccgatccgatgcgcgctttttacgagaaaggcaagcacccgactcacgccagaacgggaccggactgggcggcgttttgctcgaattggctggcggaatgggagcggaccgaaaatccggaatatctccacaaaatccaaacgggaatcaactgtctgaagcggctgccgctccgcttattatccggcccgacatttgaatatgacccggcgacctcgatgcttcatcacatgggagacggcattgcgggcggatatcatatgatcattgccttcggcgcgccgcaagtgtggatggagctggctgagcttcttgatgaccgggaatgggaggatatgctgagtgaattcggcgaattttacacactcagtgatgaggaaaaacgaaaaaaaagcggaggcgctcttcatgacgggcattttcactggccgatgttcgccgccagtatgacagcctacgccgcaagaaaaaaacaagatcctcatctcgccgccaaagcgtggaatcttttgctagaagataagctcagccatacgccgcttccgatcaaaccggagcgcatcgagacatggacgcagctagaggagcttccatgggtgacaacgaacactgtctctcaatggtgtttaaatgtcatagcggcgctggaactgatcggagattcccttccggcaaaaaaagaaacatcgggcaaaaaaggataacagccggaatttcataggagaaatggtgcaaaaaatgaagattgcaagaatttatgtaagcgctttatattgagaggggcaaaggggaaatgcaaattgaaaaaagggggacttacgcaacatgaaaataagaatgcgaaagaaatggatggccttgccgcttgctgccatgatgatcgccggatgcagccattcggaaacatccaattcagcaagcggttcgaaagatacgatcaaaattatggcgccgcttttatcgccggaaagcccgagtgataagagcccttcattaaaagcactcgaaaaatacacaggcaaagagattaaggtcacatgggtgcctgattcatcctacaacgacaaattcaacatcgtcatggcttcaggagagatgcctcacgcgattgtcattaaagataagtcagccggctttatcaaatctgtcaaagcaggggcgttttgggagctgtctccttatttaaaagactacaagaatttaagccaggcagatgaaaagattttgaagaacagctcggtgaacggcgaggtgtacggaatctacagaacgagggatctgatcagggcgtgtatgatcatcagaaccgactggctgaaaaatgtcggtctgaatatgccggaaacgcttgatgatttctatgaagtgctgaaagcctttaaggaaaaagatcctgacggaaacggcaaggatgatacgtacggcatggtcgtgccgaaatggatgggactcggcaacggaagcccatgggatgttctgcaaatctggttcggcgctccgaaccgctacggtgttgaaaacggaaagctgattccggattttacaacgaaggaatacatggatgcgctcacgttttttaaaaagctctatgatgagggattgatcaataaggactttgctgtcatggattctgcgaagtggaatgatccggttgtaaaaggaaaagcgggtgtcatcgttgatacaggctcaagagcgtctcaaatccaaagcgcgatggaggaggcggatgagtcgaacaaggatatcattgatatcgtcggctcgcttgagggaccgaatggcaagcgcaccttcccgacatctggttattcaggcatgatcgcgataccaaaatcaagcgtcaaaaccgaaaaagagctgaaagaggtgctgtccttcctcgataagatgaatgataaggaagcgcagattctcacgaacaacggagtgaagggccgcaattacgagctcaaggacggcgtattcacctcacttgaaaaaaacaacaaatctctcctgtatgagcatgaaggcttggcacagttcagcatgtcgattccaaaaagcgagtattacatcgaagaccagaaaaccaagctcttccagcatcgcaaggacatcataaccgaaggagaaaaaatagccgtctttaacccggctgagtcgcttgtatctgatgtctatacccaaaaaggagcccagcttgacaacatcatcctcgacgcgagaacacaatttatcattggagaaattgatgaaaaagggttcgatgatgcggtggagctttggaaaaaaagcggcggcaatgaactgatgaaggacttgaacaaattgtaccaatcgtcaaaataaaccgatgcgcctgccgttcggcgggcgccccggtatcacgaaaggagaacagatatggaaacagtgccgaagaagggagatgcacctgttctcaccgctggaaaaggcatcagctggatggctgcgctcaaacgggacaaatggctttatcttcttcttattcccggtctgctttatttcttgattttcaaatacttgccgatgtggggtgtgctgatcgcttttaaagactattcgccatatctcggcttctggaaaagcgaatgggtcggctttgattatttcaaagacttttttatgaatccggattttttccggctgctgcgcaacaccctcatgctggcgagtctggatcttttgtttgcctttcccgcgcctctcattttggccctgcttttgaatgaggtaagaaaggctgtgtataaaagatgtatccaaacctttatttacgtaccccattttgtatcatggacaattgtggtcagcatcaccttcgttttttttactgtcgatacaggtgtgatcaacaaaatgatcatgagcctgacaggtgagcagatttctttcttgtcggatgcagactggttccggccgatgattgtgatgcaaagcatttggaaagagacaggctggggaacgattctatttttggcagcgcttgctacggttgatcaagagcagtatgaagcggccatcatggacggagcggggcggttcaggagaatgtggcatattacgctgccggcgataagaagcaccattatcgttttgttgattttaagaatcggcagctttttgaatcttggctttgaacaggtgtatttgatgacgaactcactcaaccgcagtgtggctgacatcttcgacacgtatgtgtacatgatggggattacccaaggggcgtatagctacagcacggcggtcggtttgtttaaatcagttgtcgggattatcttgatttttggcgccaattacattgcgaaaaagtttgatcaggaaggattgttttagaggagggagaggtatggctgaaattcacacgatgcacaacaccaaagccggacgggtgtttgacgtctgcaacattctgtttctcggcggtgtcggcgcgattaccattttgccgtttttatatattatcgccggttcctttgcgacagaagcggaacttgcccagcggagcttctttattttcccgaaaacctttacacttgatgcttacaagtatgtgttttcgacaccgacgttccttcgaagcatgggcgtgtccatcttcatcacggtggttgggacggctgtacagctatttttcaccttcacgatggcgtatccgctggcgaagcggcatgtgaagggacggaatctgctgttgaatctggtgattttctccatgctgttttcaggcggcatgattccgacgtaccttgtcgtaaaatcacttggccttttggatacgtattgggcattgattctgccgatggcgattaatccgttcaaccttattattatcaaaaacttctttcagcagctgccgcgcgagctggaggaatcagcaaaaattgacggctgttccgaaatcggcgtcttctggcggatcgccctgccactgtcaaagccggttatagcgacctttgcgctgttttatgcggtcgggatttggaatgatttcttccacgctctcttatatatcaatgacagtgcaaaatggccgctgcaaatggtgcttcgccaagtcacgattttatcggatttaacggcgaccaatggcgatacgatgcaaaatgccgttccgccggagcagggaattaaactcgctgtcattgtcattgcaacgctgccgattttggcggtctatccatttttacaaaaacactttgcaaagtggatgctgatcggttcggtgaaaggctgagaaagggagtgtttcatatcagtacattagatcggattaagattgcctatatcggcggggggtcccaaggctgggccagaagcctgatgagtgatttgtcgattgatgaacggatgtcaggcacggtggcgctctatgatcttgattttgaagccgctcagaaaaatgaagtgatcggcaatcacagcgggaacggcagatggagatatgaggctgtttctactttgaaaaaggcgttatcagccgcggatatcgtcattatttccattttgccgggatcactggatgatatggaagtcgatgtccacttgcctgagcgctgcggtatttatcagtctgtaggtgatactgtcgggcctggagggatcatcaggggcttgcgtgctgtgccgatatttgcggaaattgcccgggcaataagagactacgcacctgaatcatgggtcattaattatacaaacccgatgtctgtctgtacaagagtgctgtataaagtgtttcccggcatcaaagcgattggctgctgccacgaggtattcgggacgcaaaagttattggcggaaatggtcacggaaaggctggggattgaggtgccgcggcgtgaggatatccgcgttaatgtgctcggcattaaccattttacatggatcacaaaagcctcttaccgccatattgacctgctgcctatattccgtgaattcagcgcgcactatggggaatcaggaggatatgagctggagggggaaagctggagggacagcgtcttttgttcggcacaccgtgttgcgtttgatttatttgaaacgtatggcgccatccctgctgcgggagacaggcatctggcagagtttcttcccggcccatacctcaaacagcctgaagtatggaaatttcatctcacacctatatcattcagaaaacaagacagagctgagaaacgacaagaaacagaacggttgatcgtgcaacaacgaggcgttgctgagaaagcttcgggagaagaaggcgtgaatatcatagtggctcttctcggattgggtgaactcgtcacaaatgtaaatatgccgaatcaaggccaggtctcaaaccttcctatacaagccattgtcgaaacaaacgcattcatcacaaggaaccgtgtccagccgattttgtccggagcgcttccgaaaggtgtggaaatgctggcggctaggcatatatccaatcaggaggcagtggcggaagcaggtttaacaaaggacactggcctcgcgtttcaagccttcctcaatgacccgcttgtcaagattgaccgcagtgatgcagagcagcttttcaatgacatgctccaatgcatcatgcaacgttgagcggagtttttccggtttagaaaggaaagcattgaccatactgatagtattatcaagaagtaggtgctatcaatatgggaaattatttaagcgttgcggtagaactggtctgcggtttaggcattttatttatcatcttaaagcttctcgggaaaacccaattttctcaaattacgccgtttgactttatctctgctttaattttaggagaattagtcggaaatgccgtttacgatcatgaaatcaaaatcaaagaaattatttttgcttcgctattgtggggcgtgctgatttatattattgaatttatcacgcaaaaaatgaaatcatcgcgaaagttcttggagggcgagccgaatatcgtcatccgcaaaggggagcttcaatataaagtattgaagaaaaataagatggacattaaccagctgcaaagccttttgaggcaagcggggagcttttcgattcaagaagtagaatatgcgattttggaaacaaacgggatggtcagtgtgcttccaaaatccgactttgacaaaccgaccaataaggatttgcaggttccttcgaagtctgtttccctgccaatcacgttaatcatagatggagagcttgtccgggataatctgaaggaagcaggtgtggatgaacagtggctgaagcaagaattgaaaaagaagaacattgataagacggaggacgtgttatttgcagaatggcataaaaataagccgctgtataccgtaacatacgaacaaagcagatcaacatgactcttagaaaaaagcttgcagcaaggcgcaagctttttattgattgtatgtcccttgtttgacagcacgtacatggtacatgctcacttcagtgctgatcagatagtcaggctttggtttgcctttgtttgctttgtggccggcgatatgcgcatcgcttttttcccattgcttccagcgatcctctgattcccagcgaatcatgacaacaacttcctcatcaccgcggcgtacgtttttctcaagcactgtcacatcaattaaaccttcttgtttttcaatgattccttcagcgctgaaacgttctatgactttatctgcaaagccttcttttaccgtcatttttctcaactgaacaaacattcgtctcactccaatcattctcacatatgaataattgtaaatgaaattcattctcattgtcaaagaaagcgcagggcggaatcgaaccgccgtgcgcaacagtttattcttttaataaaaacacatttccgtcttcgtccttaaattgaacgaaggtgccccactccatttgattgggctcaccgagaaattctacaccgtttgtcttcattttctcgtatgtaccaaagatgtcttcgcattcaaacacaatagaagccttcatttgctctgagcctttcatcatggctttcgggtaaatgactaaacgagtctcggctccttttggcgcaacctccagccagcttgcttcaggtcccattgggtggtccgctgcaatatcaaagcctaccttctctgtccaaaattgcttcgctttctgctggtcctcgacatatacagcaacagtgccaatttgtttgatcatagggaaacctccaagttgaaaagataataatactataacctgtttacggccgaagtaacataaaaaaatcagccgggaaaccggctgatttttaaaatgagcagctgacaacatcgatgtgatttgtgtctaaggcgaaataaacccagcggcgccgtgaggaatcccaataaaagccgccgacggatcttctgccaaggatgatcgggtaaaaccaaaatgagcggccattggttaaccaaacataggtaaatcggaaaaggcaaggacgaatggtgattggttcaactaacaaaacggctccttgagaaccctgcggttttgggggtttcgctggtatttgggaaggaggaggtccctgcggcgcaccgccgaagcctgggctggcaccgctgccaataccagggccggagccgccgccaaaacctggaacagcgccaccgccaataccagggccggagccgccgccagagcccggaacagcaccgctgccaatgccaggccatggatatcggtattcatattcaaaagcaggccaaggctcataaaaatgccccgcaaacatataaggatcaacataatacatgtgataacgtcctttctcattgtaaactgtacactgcagtttatgcgggcggactcttattggtgcattcgcctaaggatatgaagctggaatgctctcaaagagcagaatcatttgatttttctctagtcttattcacaattccgatttatcattttataatgaaagtgcttctattacgaaaaaggagacagaccgtgaatatcgatcaattattatatcaatatatcatagacaacactgcggatattactgagaaatggttcagtttgcgttgccagctaaaaggcgagctatattccgccagccatttaagtgaagaaacgaaaacacttttaaccgagcagcatacatttaccaatataacaatcgcaagcgcatttctggaggatcaaaccgattttcaagacaacatgacaaaatgggcggaaaacgttgcgaaaaacagggtagagcaggatgttcaagttcatgaggtcgtagaagccatatccaactctagaatctcattctgggacgcagtcgccacatttataaaagagaatcaggagatcgtgacaaatgaggatgcagaccgatggaaccgcattgtgaatcagtcgttcgataagctgattattgaattctctgagcagtaccaaaaattcatgctgatgaggctcacatctcagcaggaactgatctcagagcttggctgcccggtcatttccattgccgatggaatcgggatattgccgcttatcggctccattgatacaaaacgggcacaggtcattttagaaacagtgccggtccgctgtgtcgagagaaaaatcacaagcctcgtcgttgatctttcgggtgttccgattgtggataccatggtggctcagcaattgtacaacctgtctaaaacgcttttcttattaggcgtcaaagccgtattttcagggattcgcccggatgtggcccaaacatcgattcaattggggcttgattttagtgaatatgaaacgtacggcacgctgaagcaggcattagaaaatatgggtgtccgctgtattgttgaggaattggaagaaaacaaataggaagtttccaggcatatgattgtccgtcaccgggtgatcatatgcctttttgatttgaacagaaatcaccattgatttatcaaaaaaaacataatattataattcttataagaatactgtgaattaaaacctattcaacagggggaaggtcttttggtttcaaaatcaacgattgatccggaagtgattgaaaaaatcatcagctcgctggaaacactcgatttcggcaccgttcaaattacggttcatgattctcagattacccaaattgagaaaatagaaaagcaccgtttttcgctgaaaaggaaagaatcaaaatgataatgtaaagggcgtttgttttcattaaattctccttaaaacatatacatatttcatccaatttttatataatagacctttaagatcattttttaggaggatttttgacatgcaagctacggttcacgagagtaagcaatcgatcatgcaacgcattttgacagtctttgtctttactttgctgatcgcgactgtcggcctttttatcggccaatttgttcctgtcgctttgatgctgccgctttctattcttgaagtggtgatgattattctggccttctggatgcgcagaagaaaagcggtcgggtatgcgtttgtatatacattcgcgttcgtttccggcattaccttatttccgatcgtcagccattacgcttccatcgccggcgcctatgtcgtgcttgaagcctttggttctacatttgtcatttttgccgtcttaggcacaatcggcgcaaaaatgaagaaggatttatccttcctgtggtcatttctgctggttgcggtgctcgccctcgcagtggtagggattttcaacattttcagcccgttaaactcagcggcgatgatggcgtattccgtgatcggaaccatcgtcttttccctttacattttgtatgatttgaaccaaatcaagcaccgccacattacggaagacttgattccggttatggcgttatcgctgtacctagactttatcaacttgttcatcaacctgctccgcttcttcggcattttgagcagtgatgattaatgaaaaagcgtctgtcattggataggcgctttttgccatacatcaaaaaggcaggtggagtattggtgaaaaaacaaatgggcgcatatgtatctctggcagcagctatggcgatcgtcggcagttctgtcgttgtcggcaagctgatggtcgaacggattccggtctttctttcctcaggattgcgttttttgatcgcttctgtcgtattgctcatgctgctgttttgcattgaaaaagggtttccggctttgacgaaaaaagatgtgttcgtattactggtgcaatcattcacaggcgtgtttttgttcagtatttgcctgctgtatggggttcaatatacgacgggaacggaaagcggcattttgacaagcacaacccccatggtgatcggtattttatcctttttcctgcttagagaaaaaattgagaaaaagacgctgatcggcattttgctggcggtttgcggcgtaatggcgattaatttgtttggagccgggagccaagacgggacgccgcacgccttattcgggaacatgctgatcattgctgcagtcattggcgaagcgttgtttacattgatggccaagctgctatccccgcatatttcggcactggcgatttcgaccttcgtatcgctcttcggcttcctgttttttctcccgtttgctttgtttgaggcctcttcatttgattacagcgtgccgactgttttggattggtcgtatgtgctgtattacgcgctttttgtcactgttttggcgttttacttatggtatagcggggtgacgaaggtgccggcgggtgtatcgggcattttcacatccgttcttccggtctccgctgtcattttgtcaggcgtgatattgaaggagccatttgagtttgtgcatttcatcggcattgcatgtgtcatcggcggcatatttgttacggtcataaagaaaaaacagccggatgcgtatccggctgcagaagaaaagacgctatagcctgtccggatcggacgggttttttagtctttaaacacgctcagcctttcaaaaagatcaccaagcatcttcacgaacatgtctttttcctcgtcgctgtagttttccatgacagcggatattttgctgaaatggccgggcagaaattgctccaggcgtgctttgccttctgttgtcagttcaatgctgatttttcgtttatcctctgtgtgatgcctgcggctgacaaaaccgtctctcgccagcccgtccagcaggcctgtaatcgtcgctttcgtgacgtttgactgtttggcaagctctgtcggacttaacctatgatccttggcatcaaagagcagcatcagtattttgaattttccttctgacagccctcggccagcaaagtaatgctccatcacatgattcattttttttgaaatatcaaaaagagataaaaacaattcaagagagccggcgtcaatattggaatacgtttcggcgtgctctgttatatgcttatatttcggtaaatgttttaattccatcgcaagtagctcccgtacattcgttgtgacacgattataaaggagggaaaaccataacgcaacttggcttggagatgattgacagcttttcttgggacatagtaaggtaatatagttaggcgcctaactaatacatatagagctgaaaaggtggttattgatatgaaacatatgttaattgcaggaggcggcatcggcggcttgtcagcggccatttctctccgtaaggcagggttttccgtcaccttatgtgaagcggcttcagaaaaccgaaaaacaggtgcggggattcttcagccgcaaaacgcactggcggtgttgaaagaactgggcgtattcgaagagtgctgtaagcacggctttcaaacagaatggtttaaaacgtttgatgaacaggggaatttgctgtttcaagtcagtgaatcctttttagacgattcacttccgggacgcaataatatcctgcgcaaaacgttaaatgacattctcatgaagcatgccgaggcagtgggtgtagacatcaagtgggggaaaaaggttgtcgcttatcaagaaacagctgaatcggtcactgccgtatgtgaagatggagaaaaaatgcaggctgccattctggcgggctttgacggcattcactccgttgttcgcgatataatgctgcaaaaggagacggaaaaagagcatctcggcatgggagcgtggcgcttttatatcgaacttcctgatcacacatttgaggacgcgacattgatgtacagaagcggagacacacaaatcggggtggtgccattggcacaacacgctggctatgtcttcgtcctccagccttgcacgagcgattactgggatgaggaagatacccggtttgatagagtaaaagagattctttctggttttcgggggctggattttgtcacaaagcacatgtcaaaacagcatcctgtcatctttaacaaactggagcaggtcgccgtgcaggagccatggcataaaggccgcgttgtcatcggaggagacgccgcccacgccggcgcgccgaccctggcgcaaggagcggcaatggcgatcgaggatgccatcgtcctcgccgaagaactccaaaaccacgccgatcacgaaacagcattacaggcgtactacaaaagaagagccccacgagcgctcaaagtccagaacctatcatcggaaatcgtccgccgcgggctgaaaggagagccgggagcggaagaactgattggggagtgctatgcggtgttgagggaagggtattaaataggaaaagtccagaaagtgatttctggactttttagtcttgctctgttttattccttatccgctcaatcacctcatgcagcccctcaggcttataaaactccaccggtgaactgcctttctcaaacgaaatcgtctcggcttcaatcagcgcgacatagcgcccgtttacttttgcgagatgaatagaatcgccaaaatccgctagcaatcccttaatctctgtttctccgactttcattttcagctgggcctctggcgtgtgctcgatgatttgggcggaggcttcgatgacttgatgggtgtcgaggcgctcttggatttcccgtttttcgcttgcttcccaaatctcaatgtcgtgctcgaactgcttgagttcttcgctgttgtcttcaaatgtctcgtagacgtgctcctgtaccatgttcatgacctggtttttcatgatttccggcatcgattctccgtactcgacgaatttcagaaagtcctcaaaatagcgggcgtgcgaggcctggtggattttcagttcaccttcctcgaccattccttcctctggcatgtacgggtattggatgcttttcatgttttttgtcgtgatcgccatttcgacttttttaatgagagaagacgcgtcagagatgcgggcgaccttcggctcaaaatcacatttcataatgaagacaaatgactcgtcaaagtattttctcggcacggccgaagcgacgagaaacacgccgccgcgaaccgcgcttgtgtcaaggtacgtgcggacgaactgctcgctcagctcattgaagtcttcttttgtttccgccagacgcgcgcggttgaacatgttgtagtttgggttggaatcgagctcgtggccgggctcgacgataaaatggccgattttcgtcggcacctgctcggactgcggatggcggtctgctttccgtttaacgatttttttcagttccccgtcgagaaagtccttcagctcgctttcttcaaattcgcccgtatcaagggtctggaagtgcttgaactgcttgttcgcctgctcatctttgccttccacctgtatgacataaaaggataaaaaccgaatttcaaaatccatatataaactcaccttattcgcgtattgtacagcttctcaagtatagaaaaaacagcgatcatgcgtcaattgggagaacggaataatcatgaccatgaaagggaaatgtagtcaaatagaaggcatctcatacggaaaggaatggttcgatgaaggaaacaagcccgattcctcagccgaagacgtttgggccgctcggcaatttgcctttaatcgataaagacaagccgacgctttcgctgatcaaactggcggaagaacagggcccgatttttcaaatccatacacccgcgggcacgaccattgtagtgtccggccacgaattggtgaaagaggtttgtgatgaagaacggtttgataaaagcattgaaggcgccttggaaaaggtccgcgcgttttccggtgacggattgtttacgagctggacgcatgagcctaactggagaaaagcgcacaacattctgatgccgactttcagccagcgggccatgaaggactatcatgagaaaatggtcgatatcgctgttcagctcattcaaaaatgggcaaggctcaatccgaatgaagcagtcgatgtcccgggagatatgacccggctgacgctcgacaccattgggctatgcgggtttaactaccgctttaacagttactacagagaaacgccccacccgtttatcaacagcatggtgcgggcgcttgatgaagcgatgcatcaaatgcagcggcttgatgttcaagataagcttatggtcagaacaaagcggcaattccgccatgatattcaaacgatgttttcgttagtcgacagcattattgcagagcgcagggcgaatggagaccaggatgaaaaggatttgctcgcccgcatgctgaatgtggaagatccggaaacgggtgaaaagctcgacgacgaaaatatccgctttcaaatcattacgtttttgattgccggccatgaaacaacgagcggcctgctttcctttgcgacttactttttattgaagcatcctgacaaactgaaaaaggcgtatgaagaggtcgatcgggtgctgacggatgcagcgccgacctataaacaagtgctggagcttacatacatacggatgattttaaatgaatcactgcgcttatggccgacagctccggctttcagcctttatccaaaagaagacacagtcattggcggaaaatttccgatcacgacgaatgacagaatttctgtgctgattccgcagcttcatcgtgatcgagacgcttggggaaaggacgcagaagaatttcggccggaacggtttgagcatcaggaccaagtgcctcatcatgcgtacaaaccattcgggaatggacaacgggcctgtatcggcatgcagtttgcccttcatgaagccacacttgtgctgggcatgattttaaaatatttcacgctgattgatcatgagaattatgagcttgatatcaaacaaaccttaacacttaagccgggcgattttcacatcagggttcaaagccgtcatcaggaagccattcatgcggacgttcaggcagttgaaaaagccgcgtctgatgagcaaaaggagaaaacggaagcaaagggcgcatcggtcatcggtcttaacaaccgcccgcttctcgtgctgtacggctcagataccggcaccgcagaaggcgtcgcccgggagcttgcggatactgccagtcttcacggcgtaaggacagagacggcacctctgaacgaccggattggaaagctgccgaaagagggagcggttgtcattgtgacctcgtcttataatggaaaaccgccaagcaatgccggacagttcgtgcagtggcttcaagaaatcaaaccgggtgagcttgagggcgtccattacgcggtatttggctgcggcgaccacaactgggcgagcacgtatcaatacgtgccgagattcattgatgagcagcttgcggagaaaggcgcgactcggttttctgcgcgcggggaaggtgatgtcagcggtgattttgaagggcagcttgacgagtggaaaaaaagcatgtgggcggacgccattaaggcattcggactggagttgaatgaaaacgccgataaggaacgaagcacgctaagccttcagtttgtcagagggctgggcgagtctccgctcgctagatcgtacgaagcctctcacgcatccattgccgaaaatcgtgaactccagtccgcagacagcgatcgaagcactcgccatatcgaaattgcattgccgccggatgttgaatatcaagagggcgaccatcttggcgtattgccaaaaaacagccaaaccaatgtcagccggattctccacagattcggtctgaagggaaccgatcaagtgacattgtctgcaagcggccacagtgcggggcatctgccattgggccgtcctgtcagcctgcatgatcttctcagctacagcgtcgaggtgcaggaagcagccacaagagcgcaaatacgtgaactggcggcatttacagtgtgtccgccgcataggcgcgaattagaagaactgtcagcagagggtgtttatcaggagcaaatattgaaaaaacgaatttccatgctggatctgcttgaaaagtacgaagcgtgcgacatgccgtttgaacgatttttagagcttttacgtccgttaaaaccgagatattattcaatttcaagctctccaagagtgaatccgcggctagcatcgatcacagtcggcgtcgtgcgcggccctgcgtggagcggccgtggcgaatacaggggcgtggcttcaaatgatttagctgagcgccaagccggtgatgatctcgtgatgtttgtacgcacaccagaatctcggtttcagcttccagaagaccctgaaacgccaatcattatggtcggacctggcacgggagtcgcgccatttcgcggtttccttcaagcccgcgatgttttaaagcgggaggggaaaacgctcggtgaggctcatctctattttggatgcagaaacgatcgtgattttatataccgcgatgagcttgagcagtttgaaaaagacggaatcgtcactgtccacacagccttttcccgcaaagaaggcatgccgaaaacgtatgtccagcatgtcatggctgaccatgcagaaacgttaatatcgatccttgaccgcggaggcaggctttatgtatgcggtgacggcagcaaaatggccccggatgtggaggcggcactgcaaaaggcgtatcagtctgtccatggcaccggggagcaagaagcgcaaaactggctgagacatctgcaggataccggtatgtacgctaaggatgtctgggcagggatatagataaagaagactggagacatccagtctttcagcgtgtcggcaaaccctcgcattcgttgtcaggactgcgcttcggtgctcaatgcgaagtggatcaacggctaaattctcaggcgtcctgcctaaacgccgtcgtcatcacatcctgtgaatatccgctcctatgctcgtccttcctagacttcaagggttttcaatcacgctgaaaagatgacaaaatcctaaaatggttttcattttaggattttgtcaacaatctggaagactggagacatccagtcttttttgtcctttcgaaaaaatggtgatcgcgctaaacattgatgcatacaataacttcagtccgccggaagggcgggctgtctgcaaaacctatttttcgtttttgctagtttatgttattcttatactcggtatctatttcttttttcaaaggcacacatgacaaaagaaatcctttttttatttcggagaaaaaaatgtgaaacgaaatgaaggtttctttcgtccagtgattggtttccaaatggttgtaataaaaatgatatggtgcgtaacataaatattccggcttgccgcggtgtatttcttgttgtgtgatgccttgattttgtttggaaagaaggaattggaaggcaggatataaagagcaggtaaatatgaatgaagaacttaaagtgtttaagaaagtagaggttgccatgaagaaacttttttcttacaaacttagcttttttgtgctggctgttatactgttttgggcaaaaacgtatttatcctacaagactgagtttaatcttggggtaaaaggcacaactcaggagatcctcctgatatttaacccattctcaagcgccgtcttctttttaggactggctttgctggcgaaagggcgtaaatcagccattattatgctgattatcgatttcttgatgacatttgtgttatatgcaaatattttattctatcgtttctttgacgatttcttgacgttcccgaacattaaacagtctggaaacgttggaaacatgggagacgggattttcagtatcatggccggtcatgatattttctatttcttagatattatcattttgattgcggtattgatctggagacctgaattaaaagaatacaaaatgaaaaaacgctttgcatctttagtgatcctttctgggatcgcactgtttttcatcaacctgcactatgcggaaaaagaccgtccgcagctgctgacaagaacgtttgaccgcaattatattgtgaaatatttaggtttatacaactacaccatttatgacggtgtacagacggctcaaacagaaacgcaacgggcctatgcaagcagcgatgatttaacaagcgtcgagaattacacgacgtctcattatgcgaaaccgaacgccgagtacttcggctctgccaaaggcaaaaatatcattaaaattcacctcgaaagcttccagtcattcctgattgactacaagctaaacggtgaagaggtgacgcctttcttaaataagcttgcgcacggcggggaagatgtgacgtattttgataacttcttccatcagacaggccagggaaaaacatctgatgccgagctgacaatggataactcgatcttcggtcttcctgaaggctccgcgtttgtgacgaaaggcgaaaacacctaccagtcgcttcctgcgattttagaccagaaggaaggctatacaagcgccgtcctgcatggtgattacaaatcgttctggaaccgtgaccagatttacaaacatatcggatacgacaagttctttgacgcaagcacgtacgatatgtcggatgaaaatgtgattaacatgggacttaaggataagccgttctttactgaatcgattccaaagcttgaatctcttaaacagccgttttacgcgcatttgattacattgacaaaccattatccgtttaacttagatgaaaaagacgcgtctcttaaaaaagcgacaactggcgataacacagttgacagctacttccagacagcgcgttaccttgacgaagcgcttgagcaattcttcaaggagctgaaggaagccggcctgtatgacaactcagtcatcatgatttacggtgaccataacggtatttctgaaaaccataaccgagcgatgaaagagattcttggaaaagagatcacagattatcaaaacgcacagaaccagcgtgtgccgctgatgatccgcgttcctggcaaaaaaggcggagtgaaccatacgtatggcggcgaaattgacgtcatgccgacacttctgcacttagaaggaattgattctcagaaatacatcaactttggtactgacttattctctaaagaccacgacgatacagtggcattcagaaacggagacttcgtaacgccgaagtacacatcagtcgacaatatcatttacgatacgaagacaggtgaaaaactgaaagcgaatgaagaaacgaagaatctgaaaacaagagtgaaccagcagctgagcctttcagacagtgtcctgtacaaagacttgctgaggttccataaactaaatgatttcaaagctgttgatccgtcagactatcattacggcaaggaaaaagaaatcaaataagatgaaaaagagccttgagcgggcgcattgccttcgctcaaggctctttttttggttatacaaccaacttgaaaaaatagattccatttggtcaccaaggctggctttctctcatatcattacagtagattttgaaaccggattgaaatcggacaaattatcggggaaatgccttgatagattgtgaagatgtaccaggtttcgaactcaatattcatagagatgaggggtagagatgaaagcggtcattctctgcggcggaaaaggaacgagaatgagtgaagtcacgaatgacattcctaaaccgctcgccatgataggcggcaaaccgattctatggcatattatgaaaatttatcagtactacggagtaaacgagtttattctgcttttgggctataaaggagaaaaaatcaaggaatactttctcgactatgaatggaagcacaacagcctgacactcgacagctctacgggagaggtacagatgctgggacagcctgaaacgtggaaaattacgtttttggagactggggaagatacgctgacagccggaagaatcttgcaggcgaaagactatatcggtgatgaaacatttctgcttacctatggggacgggctggccaatatcaatcttttccatctcatcagctatcatcagacaaaaggtgctgccgcgactgtcaccggcattgacaaagtctcgcagtttggcaccttgacggttgaggacggcatggcgaaaacattttctgagaagacatcaagtgacggaatcatcaacggcggattcttcgttctcagtccaaaggttttcgagtatttgccgaaggacgggaacgcgatgttcgaagatgaaccgctgaagaaccttgccaaagacggggagcttgctgtgtaccgccattacggattttggacggccatcgatacgtataaaaatctcttagaagtcaacaaaatgtggaatcaaggacaacaagtatggaaggtatggtgaatcgatttgagtttctggaaaaataaaaacgtatttgtcacgggatccacaggtcttttaggaagctatttggtgaaagagctgatcgatcagggcgcaaacgttacggggcttgtcagggatcatgtgcctcaatccaatctttatcagggagaacatatcaagaaaatgaatatcgtgcggggctctcttgaggacttggctgtgattgaacgcgcgcttggcgagtatgagatcgacactgtctttcatctcgctgcacaagcgattgtcggcgtagcaaaccgcaacccgatttctacctttgaagcgaatatcctcggcacctggaatattctcgaagcctgccgcaagcatccgttaattaagcgggtcattgtcgcttcaagtgataaagcttacggcgatcaagaaaaccttccatacgatgaaaacatgccgctgcaaggcaagcacccgtacgacgtctcaaaaagctgcgcagatctgatcagccacacctattttcacacgtacgggcttccggtctgcattacgcgctgcggaaacttatacggcggcggagatttgaacttcaaccgcatcattcctcagacgattcagcttgtgctgaacggggaagcgccggaaatccgaagcgacggcacatttgtacgggactacttctatattgaagacgccgttcaggcttatctgcttcttgcagaaaaaatggaagaaaacaatcttgccggagaggcctttaacttcagcaatgagatccagctgaccgtacttgaactggtagagaaaatattaaagaaaatgaacagtaatctgaaacctaaggtgctgaatcagggaagcaatgaaatcaaacatcaatatttatccgcggaaaaagcaagaaagctgctgaattggacaccggcctacactattgatgagggacttgaaaaaacgattgagtggtatacggaattcttcaaaaagtaatgtgaaacgaggtgaacaagactgtgaccagcgcgtattgcaccgttttatcaaaaggaagattatatcaggcagtcgctttgtttaagtcgttagagcaagttgatcaagacagtcccatttttatactttgcatggatgaagatacgcaccgcgtgttacagaagctgaagatgaagcagctgaaccttgtgccggtggccgctcttgaaaatgaattgctgctgaagctgaaggaaactagagatcaaagtgagtattgctggacgatgaagccgatctttctgcaagctgtgctgaacagcaatcccgagctggagcgcgtgacgtatattgacggggacctctttttctatgcagatccatcgccgatttttgaaaaccagccggactgctcggtgctgctttcacggggggatattgtaatcccttcttttgagaaagagcagattgacatgctgcagcgtcttttaggcagatataattccgggtttatcagcttcaagcatgatgatgcaggcacggattgcttggagtggtggaaggaacgctgtcttgaggaatgcaaaaatgcaccgggtgaagggaaattcggtgatcagggctatttggattatatgtctgagctgtttccgaatgtgtgtgacattacaacacccggcgtgaacatcggccattggaattatggacagcatacgttttcctggaaagatggccggatcgtgctggaggatggcagtccgctgatcttttatcatttcagcggataccgaatcgtcagcatcaatgaaatcaaacagattcatgaaacaacccgcacagatctgccgtttgtgcatgaactgtatcaagagacactgccgcatatcattcagcacatgaaaacgttagaccctgaatttaacggttttgcttcaaaagatgacaacaaataaatgagtaaatacaggaagtgaaaatgaagtgaaagcaagcgttattattcctgcatataattcaaaggagcgtctttacaacagccttctgtcattaaaccagcaggagtgcgatgaagaattcgaagtcattgtagcggacaatggctctgaggacgggacgctctcgatgcttgagtcatttcaagctgattttccgctgatctttacacggattaaagaaaacaggggcattgcgtacggacgaaatcaggcgcttcgcaatgccagaggagacatcctgattttccatgacagcgatatgcttgcggcaaaggaccttgtggcaaaacatattaaagcccatgagaacgaagagaatctcgtcgtgtgcgggttgttttggaaacggatctacagtttttactatgaacggtttgaagaagaacataaggaacagctcgcaaagctcacaggtgaaatgccgaagaaagacaaacaaaagctgctggaggaagcggacatcaaaaacggaagctttcttgataaaagctttgacctcgataccgactttatagacgtgctcaagaagattttagatgagtacggcgatgacttgaaaggctatcatatgccatggcgcttttttatcacgaataattcctctgtgaaacgcaagcatgtggttgacctcggtttatttgacgaaggcattgtgcggtacgggtttgaggattatgacctcgggatcaggcttcatcaggccggattgaccttcaggcttcgccgtgatattgtcagtgttcatcaggaacatccaagcaattgtaagtctgtagacgatattcgggcaaacattgcctatatgtgcgataaatacaataacatccgctccttagacgttcatctcgcttttaatgggccgttcccgcctgacatgacgaacagaatcatggctgatattcaaaagctgctggaatcacagaaatatgatatgctgctgaatctgtttcttgagcttctgcatgttgttaaagagcgcaacattgatccggattggcgaaagaaatccccaagggtgacggcgaaaagctttgatttacaaactgtccgcaagcttctgcctaaggcgaagaaaaagctaggcgtgaacgattttgccaacgcactgtatgcgcttgtcaacgatttgctgcacgtggatcttagatcattggatgtggtataagtgagtacatttcatttttcaacgatagtgtcaaggacacatatctttaagctcatgcctatgattcattctctccatgagcattgcgatgattttcatttatatgtgctgtgtgtcgaccagaaagcgtatgaattgcttcagcacgtgccatgggagcatgtaacctttgtgcagctgcatgaaatggaagacccggagctgctgaaagcgaaaagcaacagaacgtttcatgaatattgctggacgttaaagcccgcctttttgtttcatgtgatgagcaagtgggatgacgctgaatactttgcccatatggatacggatctatttttcttttctgatccggcacgtatttttgcagaaaacccaacggcgtctctgtatttgactgatcatcgtaattcgccgcgcttcatgtcctactacgaccgaaccggacgctttaatacaggctttgtcggcgccggtaatacaaaggaagcatatgaagcggtgtggcagtggagacaggactgtattgaattttgcacggtcgaaatggatacggaacgaaagacatatggtgatcaaagatatgtggagaaatggccggagcagtttaaaggtgttcatgttgtcaaatccataggagccaatacagcgctttggaatatcgaaaactataaggtcgggcaaaaggacggccgcgtgtatatagatgaaacgccgctgattttctatcatttctctgggtttacgctggtgacagaaaaagagtttaatctttgctggtactaccggattgaagacgaagcgacaattaagatgatttatatgccctatatattaaatctgaaaagatggattgatgaaatacagtcggcgtttccggactttgcggatggctttatcccgaagcacgcagtgcctgacactcattttatccagctggattaaaaaaccccctgccgcctggcaggggttttttcagctatgccattctctcagcttctggtcacttggcaataggaaggcaaggatgccgaggacagggagaaaggcaatggcgatcatcgtcggggtcagtcccgcggcatcaatcagagcgcccagcgccacagcgccgattgcgcccatcccgaaggcaagcccgacggttaaaccggacattgtgccgatttttccaggaactagctcctgtgcgtagacgaccgttacagaaaagctcgacatcagaaccaagccaatcaatgcgagcacgccgtaggcgagaaccgggccggcaaatggcagcacaatcgccagcggcgccgagcataacagcgaaccgaggataacgaagcgttttccaaaacggtctgcaagcgggccgccgagaaacgtgccgatcgcgccgaacagcaagaagacaaaaatatagctttgtgcctgctgaatgcttacgtgataggtatccatcgcgtaaaacgtgtaaaagttaccgatcgcactcgtataccaagaacgagcaaaaatgagaaatataataataataagagcagatacaacagatttggtgatggccgtgttttcagccgttttcttttgcttgcctgatttctgggcaaggctgccgagacgtgaggcgtaccatttcgcaatatacatgagaaacataacagcaagcgcggcgacaagcgtgaaccaaacagcgccgaattgcccgagcggcacaaggatcagcgcggtgatcagcggtgccatcgcctggcctgagtttccgcccacctgataaatcgattgggcgagcccgcgttttgtgccggcggccatatacgccacacgggagccctccggatggaaaatggccgagcctaatccaatgaaaaacacacagcataagatcgttatgaatgacggggcaaatgcaaggcccaaaatgccaagcatgctggcggtcaaaccgactggcagcgcatacggccgcggccgtttatcggtataccagccgacaacaggctgcatgacggatgacaccatgtttaatgtgaaagcaatgatgccgagctgtgtaaacgtcaggctcatggagcgttccaaaatagggaacatggccggaatcacagcctgaagcgaatcgttgagcatatggcaaattccgataataatcaaaatcggatacaccgtggtgcctggtttttgaactgttttttcttttaacggggcggcgatagccattgagtctcctccttacatatataaccaaagcataccaccatattattcataaggtgaagaatttatcaagaggaaaaaagattcttatgaaagaaataccgtcagcctgattagcagctgacggtattttcgatattcaaaatgtgatatagctcttcaagcttacgaatctcataggttggtatgatctctggcacattcggcttcatgtcagggttcatccagcaagtatcaagcccggcgagctgtccgcctttgatatcagcagttagtgaatccccgatgattaatgtgtgctctgctgaaaattgaggaatccgttcaaacacgtaattgaaatattccttcatcggcttttggaagccggtgtcttcagaaacgaaaatgtccttgaagaatggaaataatcctgaatcacggagacgcttatattgtgtgtgagacacgccgtttgtcacgatgtacaaatcaaactgttgctgcagatttgagatgagatcaaatgcaccgtcaataagctgatgtccttcttcaagaaagcggcggtatttttgctcaagcaaagcgccgtccgcttcgtaaccgtactccttgagcaaagcggaaaaacgtgtgtttacgacttcatcccgtgtcatcttaccttcttcaaaggctctccagagaccttgattgatggttttatactgcgccttcatgtcatttgttaaaggaatgttctgatcttcaaacagcaaacgcagggctaaagcttctgccgcttgaaaatcaaggatggtatcatctacatcaaataataaagtgcggtatcgcttcatctgtgtgtctccctttctcatatgtattcaaagtatagcacataaaaaaaggaaaaagccggcgggtgaggcaccgccggctgaaaagagattatttgtttaataagctgtgttttctcgaatataggaagtaaaccagcgttccgacagcgatccagatgacaaatgaaagccatgtgacgccgggaaggctgtacatgaaccaaaggcagatgcctgcgctgataatcggcacaaccggaacgaatggcactctgaaggacgctttgatttcaggatgtttctttcttaacacaatgacagcaatggaaatgaccgtaaacgcggcaagtgttcccatgttcaccagatgggccagcgttccgaggttaataaagccggcgattcccgctgcaacgatccctgtcagccatgtgttgcggaacggggttttaaatgacggatgaacctttgcgaacaatccaggcagaaggccgtctctgctcatggcaaatgtcaagcggacctgtgcgtacagcaaagcgagcatcaccgtcgtaatcccgataatcgcaccgacagaaataattccggcaacagcgtcctgtccgacgaatttcagcgcaaaggatacaggatctccgacattcaatttggcataaggcatcatgcctgtcagcacaagcgataccgcgatgtacagaaccgtacagacggctagagctgaaataatgccgacgggcatgtttttttgcggatttttcacttcctctgatgcgttagaaaccgcgtcaaacccaaggtacgcgaagaatacagtggcagcgctaagtatgacgcctttcatcccgaatggcataaaaggagaccagttatccggtttcacatagccgatgccgacaataatgaacaataatatgatcgcgattttcatcagtacgatgacgttgttaaagcgtgtgctttccttgacgcctctgctgacaatcgcagtgatgaggagaatgatcaccgcagccggaaggttaaatacggcgcccgccgtgcttcccggcgctcctgtcagtgcagccggaatatgaagattgaagccggcaagcagtgattgaaagtatgaagaccagccggtggcaaccgccgacagtgcaatgacatattcaagcatgagatcccatccgatcaaaaaggcgagcagctctccaagtgtcacgtatgagtatgagtacacgcttcccgaaatcggaatggaagacgaaaactcagcataacagaaagcagccagcgcacaggcgagccccgctaaaataaacgatatgatgagggcgggacctgcaccggtcgctgccactgttcctgtaatgacaaaaatccctgtaccgatgacacaaccgataccgagcaaggttaaatcaaatgcgcttaacgtacgggcaaggctttttgacttgctctgcgcactcaatgtttcaagcggtttttttctaaataatgaactcatcaaaagttcctcctagaaatattcaaaatattctaatcattatatgcagttcttgttgtattatattgtcgaaatttgacgtagtcaataaaatatttttctgctttaaatgatagaagcgaaacagcgttgtcgtatcataggatagtaatttttactaatcgtatattcaattttatgcaagatgaaccgatagaaaaaatagattcgcccatattttgatttgcggttataaaggagatgctgaccatgtttcaatatgaagagttgaataaacagtttatcggcgggaaatggcaggagggcagcagcccaaatgtattggaaaacaaaaatccttatactcaaaaaacattcacaacattccgtaaagcgactgctgacgatgtagatgaagcgtatcgggcagcggcgctggcaaagaaaaaatgggatgcggtcaacccgttcgagaaaagaaccattttagaaaaagccgtcacgtatattgaagaaaatgaagaagccattatttatttgattatggaggagctaggcggtacaaggctcaaagcagcttttgaaatcggtcttgtcaaaaacatcataaaagaagcggcaacgttcccaatccgcatggaggggaaaattcttccgtcaacaatagatggcaaggaaaacagattatatcgcgtgccggcaggcgttgtcggtgtcatcagtccgtttaacttcccattctttttatctatgaaatcagtggcgcctgcactcggagccggcaatggcgttgtgctaaagccgcatgaggaaacgccgatttgcggcggaacgctgattgcgaaaatttttgagaacgcgggaattccagcggggctgctgaatgttgttgtcacagacattgctgaaatcggcgacagcttcgttgagcatccagtgccgcggatcatctcatttaccggttctacgaaagtcggcagctacatcggacagcttgcgatgaagcattttaaaaagccgcttcttgagcttggcgggaacagcgccttcatcgtacttgaggatgcagatatagaatatgcggtcaatgcggcggtgttcagccgatttacacatcaagggcagatttgcatgtcagccaaccgcgtgcttgttcattcttctatttatgacaagttccttgagctgtaccaggcaaaagtggaatcgctgaaagtcggcgacccaatggaccctgatacgattatcgggccattaatcaacagcagacagacggacgggctgatgaagactgtagagcaagcaattgaagaaggcgctgtaccagtgaagcttggcggatttaacgggacgatcgtggaaccgacgatcttaaaagacgtcaaaccgttcatgagcattgccaaggaagagctgttcggaccagtcgtctcctttatgaagtttgattcagaagacgaagcggtggatatcgcaaacgaaaccccgtttggcttgagcggtgccgtacatacgtcaaatcttgagcgcggcgtggcttttgcgaaacgcattgaaacaggcatgattcacgtcaatgacacgaccatcaatgatgaaccgaatgtagccttcggcggtgaaaagcaatcaggcctcggccgtttaaacggtgagtggagcctcgaagaatttacaacgctgaaatggatctcggtccagcacgaaaaacgcagcttcccttattaatgaaaaggagtgaatggaattgaccataaatacggaaaaagaaaccgcagatattctggacgcatttatcaaagtagccccttatttaaacagcctggttcaggatgatattacaatcggcatttatgatacggaaaaactgctcgtgaatataccggccaaaaccttttcgctgaacgtaaaagccggcgatccgctgcaggaaggggatatcatcacagatgccatccgcagcaatcagaagaagacgagcatggttccgaaagaattgttcggcttcccattgatcgcgcgtgccatcccgctgcacgacgagaatggaagagtcattggaggcgtcggcctcggaacgagccttgaggagtcgtcaaagctgcatgatgtcgcggaaagcttatcagctgttgttgaacaaacagccgcggctatttccgacatttctgaatcaattaacgggttttcaactcaaatgtcgggcatttcctctcaggcgaaaaaagtaagcgaaagcgccggtgaaatcgccgatatttcagtaactgttaaaggcatctcggaccaaagcaatctgctcggcttgaacgccgcgatcgaagcggcaagagcaggggagtccggaaaaggattctctgtcgtcgcagatgagatcagaaagctagcgacgcattcaaaagaaaatgtcggccaaattgaccagattacgaaaaaaatccacagcctgctgaaagggctggaggaatccattgagtcgattaaccagcatacagacggacaagccgctgctgttgaacaaatttccgccacgatgcaggagatttcaggaagcgcgcagcatcttgcgaaaatggccgaaaaagcgcttgaggaagagtaagagaccggggacaaacatccccggtctttttcttatcctgcatttccatgaaattcgtctgacgttttactagttttattccagcggctgatttaaaatgtacacatgaacttacgtgaggattgataggaaccatgagcatattaaaagcggaaaatctttataaaacatacggagataaaacattatttgaccatatctcctttcatattgaagagaatgagagaatcggattaatcgggccgaacggaacaggaaaatcaacgctgttgaaagtgattgccggcttggaatctatcgaagaaggagaaatcacgaaatccggaagcgtgcaggtcgaatttcttcatcaagacccggagctgcctgcggggcaaacagtgctggagcatatctattccggtgaatcggctgtgatgaaaaccttgcgtgaatatgaaaaagcgctgtatgaactggggaaagatcccgaaaatgaacagcgccagaaacacctgctggcagcacaagcgaaaatggacgcgaacaatgcatgggatgcaaacaccttggcaaaaaccgtattgtctaagctgggcgtcaacgacgtaacaaaaccggtcaatgagctctcaggcggccagaaaaaacgggtggccattgccaaaaacttaattcagcccgctgatttgctcattttggacgagccgacaaaccatttggataatgaaacgattgagtggcttgaagggtatttaagccaatatcccggcgccgtcatgctggtgacgcacgatagatatttcttaaaccgtgtcaccaaccgcatttatgagcttgaaagaggcagcctctacacttacaaaggcaactatgaagtgtttttagaaaaacgcgcggaacgggaagcgcaggctgagcaaaaggaaacgaagcggcaaaacctgctgcgccgcgaactggcttggctcagacgaggagcgaaagcccgctccacaaaacaaaaagcgagaattgaccgggtagagacgcttaaagagcagacaggccctcagtcatcaggttcactcgattttgccattggctcgcaccgtctcggaaaacaggttattgaagcggagaacgtcatgatcgcttatgacggccgcatgctcgtcgaccgttttaatgaacttgtcataccaggtgaacggatcgggatcatcgggccgaacggcatcgggaaaacaacgctgttaaatgcccttgccggccgtcatacgccggacggaggcgatattacgatcggacagacggtcagaatcggctactatactcaggatcatagtgaaatgaacggtgagttaaaagtcattgactatataaaagaaacggcggaggtcgtaaaaacggcagatggcgatatgattacagctgaacaaatgctcgagcgtttcctcttcccgcgttcgatgcagcagacgtatatccgcaagctgtccggcggggaaaaacgccgtttatacttgcttcaggttctcatgcaggagccgaatgtcctgtttctcgatgagccgacgaacgatttggatactgaaacattaagcgttcttgaggattatattgaccagttcccaggcgtcgtcatcaccgtatcccatgaccgctatttccttgaccgcgtcgtcgaccgtttgattgtatttgaaggaaatggtgtcatttcccgctttcaaggctcctatagcgactatatggaggagtcaaaagcgaaaaaagcggccccaaaaccggcagctgaggaaaaaacggctgaagccgagccgaagaaaaaacggaaaaagctttcttacaaagaccagttggaatgggacggcatcgaagataaaattgcccagctggaagaaaagcatgaacagcttgaagctgacatcgccgcagcaggcagtgattttggcaaaatccaagagctgatggccgagcaggcgaaaacggcggaagagcttgaggctgcgatggaccgctggacagaattgtccctcatgatcgaagaactggaaagctaaaaagcgtggccgcagcaggccgcgctttttttcacataatggacaaaaacgaaccggcctgcttatgttaggataaagttgtgtgtcagcggcacatggaaaactaacggagatgatgaagtatgacatgggcgatcgtgatgttaattctcatgagtctggtgaaaatcgtattaacctgtcttcctacaggcgtcatagaatggctgctcggcaaatttgaagtgcacgccaagctgagtgacgaaaatgcgagtctctctctagatggaaaacgcctcgagggtgcagagaagcagaaagtgattgatcaatttaacgaagctatcttcctggaaaaatattatatctatccaggtgatgaagagcgttatttacatccggaaaacggcggcacgcctctggtgatagatacaaaaaaaggaaaaaaagacgtgaagctgttcgtgtaccgctacgacgaccatatcgacgtcgtgaaacagtacaagaagaaagtgatcgcgtatcgagtgctttctgaaagccttcaaaaagagtctctgtcagtggcgggaagtttagcttaaacaggaaagtgaaagacgggtgctgtatgctgctcgtcttttttattgttttttaaaacttaacgtttacgttaaggttcaaaaggtgtataatggtaacagaaacggcgaagggggatttaccttggaatggatgaagattgatcaagtggccaaaagaagcgggctgacaaagcggaccatccggttttatgaagaaatcggcttgattccggcgccgaaacggacagacggcggtgtaaggctttattcagaggatgatatggaggagcttgagaaagtcatcagcacaaaagaggtgctcggtttttcccttcaggagcttcagcatttcatggaaaccagccgccagctagagttaaacaaagaggggtatttgttgtcactggatcctaaggaacggaaagaaaaactggaggaaattcaggaaaccctgaatcaccagctggatttgattgatgagaaaatccgcacattccaaagctttaaagaacgcctgcagggcatgaaaaataaagcggaacgcgccattcaatcaatcgaatgaaaagtttgttaaacgctatttttgtagcgtttcttttaatggaataaagatggaggttaggtcaaatggataagacaacacaagtgaatcagaaaacgggtttgctcagccagccaaaagcggtatgggctgtcgcgtttgcctgtgtgatttcctttatgggaatcgggctggtcgatccaattcttccggccattgccgcacaactacatgcttcacctagtgaagtatcactcttgtttacaagttatttgcttgtaaccggatttatgatgtttttctcaggagccatttccagccgcatcggcgcgaaatggacattaattctcggacttatttttattattgtgtttgcggggcttggcggcagctcaagctcaatcgctcagttagtcggctatcgcggcggctggggattagggaatgctttgtttatttcaacagcgcttgcggtcatcgtcggcgtgtcagtcggcggcagcgcccaagcgattattttgtatgaggccgcgctcggtctcgggatttctgtcgggccgcttgcaggcggagagctcggaagcatttcatggcgcgcaccgttttttggagtatctgtcctgatgtttattgcgttaatcgcgatttctttcatgcttccgaagctgccgaaaccggcgaaacgcgtcggtgtgtttgatgcgatgaaggcactcaaatataaaggcctgctgacaatggcggtatcggcattcctatacaactttggattttttattttgctagcttattctccgttcgtactggatttagatgaacacggtcttggatatgtcttcttcggctggggccttctgctggcgattacgtcagtctttacggcgccgctcgtgcacaaagcgctgggcacagtgcgttcgctcgtcgttctctttatcgcctttgcggccattctcgttattatggggatctggacagaccatcagactttgattattacatgtatcgttgtcgctggtgctgtcctcggtatggtgaatacgatcatgacaaccgctgtgatgggttctgcgccggttgaacgttcaatcgcgtcttcagcctacagctcagtccgcttcatcggcggcgcgctcgccccgtggattgcaggaatgctgtcagaacactttactgcaagcacaccatatacagtaggcggaatcgtcgtttttgtcggcatgcttgtccttctcatgggacgtaaacatcttgctggaattaaggcggggcattaataacgaaagacactgcacagatgcagtgtctttttttaatcgtggaatctccccattactaccgtattgtagtgatttccgtcagaaagcaatttctccttttttaagattccttctgcttcaaatacgtatgtttttatagtgaaatggctctttaatttgtttccaggatattcagtgagatttttttaattccgttggcatccgcttcggtcaggcattgatgcggctgggatttatcttgcagaagctgagaatgtgtccgttcatttacgattgccatttcaagtgatggttcatgctgtagagggaacgtttgccatggataaggcaaagcctgacgaatatgatcataaatgtttagaaacgctctatcaatacatacacagcgtcatgaaaaacagcttttctcggtcgagtggtttaccgcttgggcagatgaggaggattttgagctgtctgccaaaaaagagctgacccttgatgaattcacatctccattgcagctcattttaaaagacagagagcttttgagaatcgttaagaataaacggcagtaaaaaacccgcccttcagcaggcgggtttttttataaattaaagcactttcgtcgtccaagactcgcagttccatgtttctgtcgcgatatccatataaaagtctggctcgtgggaaatgagcagaatggagcctttatattctttcagagcgcgcttgagctcttccttggcatcgacatccaagtggtttgtcggctcatcgagcaccagcaggtttgtttctgagttgattagcttgcacaatctgactttcgctttttcgcctccgcttaatacggagacgcggctttcgatatgctttgtcgtcagcccgcattttgccagagcggcacggatttcatactgcgtataagaagggaattcgctccatacttcttcgatgcacgtattgttgtttgtttccttgacctcttgctcgaaatagccggtatagatgtgctcaccgcgttcaacagagccttcgagcggctggatttcaccaagcaaacttttcagcaatgtcgtttttccgatcccattcgcgccgtaaagggcaattttttggccgcgctccatgcggaggttgagcggacgggacagcggggaatcgtaaccgatcacgagatccttcgtttcaaaaatcagcttgcctgacgttctcgccggcttaaagtggaattccggctttggcttttctgccgcaagctcgatcatatccatcttatcgagtttcttttggcgggacatcgccatgtttctcgtgctgacacgcgctttgttgcgggcgacgaaatccttcagctccgcgacttcctgctgctgctttttgtaggccgcttcaagctgctgttttttcacctcgtagacttccataaactgatggtagtcgccgacataacgtgtcagctcttgattttcaacgtgataaatcaggttgatgacactattcaagaacggaatatcgtgggaaatcaggatgaacgcgttctcgtattcctgcaggtagcgtttcagccattcaatatgctgttcatcaagatagttggtcggctcatcgagaagcagaatttccggcttttcaaggagaagcttagcgagaaggacctttgtgcgctgtccgccgctcaaatcggtgacatctcgctctaaaccgatatcgctcaaaccgagaccgcgggcgatttcttccaccttggaatcaatgacataaaaatcattgtttgtcagcgcgtcttgaatgacgccgacttcttcaagcagcttctcgagctcgtcgggatcagcctcgcccattttgttgtaaatctcgttcatttcctcttccatcgcaaataaataatggaatgcgtctttcaggacgtctcgaatggattttcctttttccagcacggtatgctgatcaaggtatccgacacggacgttttttgaccactcgacttttccctcatcaggttcaagctttccggtaataatattcatgaaggttgattttccttcaccgtttgcgccgatcaaaccgacgtgctcgccttttaacaggcggaaggaaacgttattaaaaatggcccggtccccgaaaccgtggcttaaatcctttacagataaaatactcatgtttacacctctatcgttatcaaacacgcacaatcggcgtgtaatattcactcttttgattataaaggaggattcggaatgttgaaaggtataggaaagaaaaagaaaaattgcgttccgggcgaggttttgagatactatggaatagatttcaggaattgaggagaacaaaatgacgcaaacttggccatttttacataatgcacaatcatttatacaagagaattggaatgcttccggctttcaaacgccaacccctgttcaagagcaggcagcccagctgatcatggacggaaaggacgtcattgcagaatcgccgacaggtacagggaagacgctggcgtatgcgctgccggtcttggagcggatcaaaccagagcaaaagcatccgcaggctgtgattttagcgccttcccgtgagctggtcatgcagatttttcaggtgattcaggattggaaagcgggctcagagctgcgcgcggcttccttaatcggcggggcgaatgtgaagaagcaggtcgaaaagctgaagaaacatccgcatatcatcgtcggcacgccaggcagggtatttgaactgattaaagcaaagaaactcaaaatgcatgaagtgaaaacgattgtacttgatgaagcggatcagcttatcctgccggagcatcgcgaaacgatcaaacaaattattaaaacgacattaagagaccgccagcttctatgtttttccgcgacactcaaaaaggaaacagaggatgtgctccgcgaattggcgcaagagcctgaggtgttgaaggtacagcgaagcaaggcggaggcagggaaagtgaaacatcaatacctgatttgcgaccagcgcgacaaagtgaagctgctgcaaaagctgtcaaggcttgaaggcatgcaggcactcgtatttgtgagagacattggcaacctgagtgtatatgcggaaaaactggcatatcaccacgttgaactcggcgttttgcacagtgaagcgaaaaaaatggagcgggcaaaaatcattgccgcattcgaagacggagagtttcctcttttattggcgactgacattgccgcacgcggtttagacattgaaaacctgccatacgtgattcatgctgatattccagatgaagatggctatgtccacagatcaggacgaacaggccgggccggaaaagaaggcaacgtgctgagccttgtgacaaaattggaggaatctaagctgaaaaaaatggcgaagaagcttggtgttgagctgagtgaagctgtgtatgcaggcggaaaactgaagacgaaataaaaagaagggcgaaaagccctttttttgttgtaaaataatagaaaaagtttcgcgcagggggtgggaaggtggtttcaatagacaggtttcaagcagtgaaggagtcagagctgaaaattcttgaaagctggtttgagaatgaggataccagacggagaatggatgggatgctgccattagatgaatggtatgcacgagtaaataaagataaacacgatactgtcatcatggcgtatgatggacagctgccggcagggatggtcgttattgagttcggggagaagcggacatatattggattgatcgtcaatcctttgtaccggcttcaagggtacggaaaacggatattgcaaaagctgatgaccgaacctgattttactagcgtgcgggaatgggtggcatgcattgaagaagacaatcgaatcagtttagcttgctttcaagcagcaggattcactttggaagatacagaacctgatgaagatggttttcttacgctgattcttcgcagctgatctcatcgaaacacaaaaggagggcaaaaagccctcccgttttcatcttcattcagctcggatcactgaccttgatcagctgtttccctttattttctcccttaaataaaccgagaaacgcgtcaggaatgttttcgaagccttctgtgatggtttcctcgtaatggagtttaccagccttcagccattcggccagctgttttgctccctcagaaaaacgatcggagtagtcgcttacgataaagccttgcatcagcgacttcgttttaatgagttttgattggacacgagggcccatgtcatctgcttcgctttctgcgttataggaagaaatggcgccgcacaccggaatgcgggcaaattcattgagcagattcatcaccgcgtctgaaatcggtccgccgacattgtcaaaatacacatcgacaccgtctggacaagcgttttgaagcgctttttggatatcatccgctgttttgtaattgatggcttcgtcaaactgaagctcctgttttaaatagtcgattttttcatcagaacccgcgataccgacaactcgcgcgcctttgattttggcaatttgcccgactgttgaaccgacggctccggcagctccggagacaaccacggtttcgccttccttcgggcgtccgatgtccagcaatccgaagtatgctgttaagccggtcattcccaaaatgccgagataggccgaagcgggagcaaggcttgtatcaatttttcgcaaggcagactcgctcacagcggaaaattcctgccagctgagatttccgatgacgatatcgccttttttcagatgattcccgtctgacacaacttcagcgataaccccgccagaaagcgcttcatccaaggcgaacggctcaacatatgacttcgtatcctgcatacggccgcgcatataagggtcaaccgaaacataaagcgttttgacaagcacttccccttgcttgggttcaggaaccggaatggtttcaaagcgaaagtcttcatgaacaggaataccttgtggacgtcttgctaattgaatttgctgctgagatgctgtcattttcatcctcctatcacttggttgacaccactgtaacatggacaggagaggaaatacaaaaggtaagctggcatacaaaaaaggagagggggctcctctccttttcatttcgcccgtaatttcgggcacagtcccgtcggcaggcacattggcttctggtcgatcgggcttctcatgatgcagcattccaagccgaagacttcacggaaaaatggctgggtgaacacatcttccggtgttccggcgttgtatatttttccgtccagcacactgattagatagtcagcgtattgagcggcttggtttaaatcatggagcaccatgacaacggtgcggccatggtcgcggttcagctttttcagcagttcaagcacttcaatctgatgtgagatgtctaaatacgtggtcggctcatcaagcaaaagcaaatcagtgccttgcgcaagtgccatggaaatccaggctctttgtctttggccgcctgagagggcatcaagtgtccgatccttcagttcaatcatgcccgttgcttccagcgcccactctaccatgtcatgatcctcttgggtatgcttggataacagctttttgtgaggatgtctgccaaaatagcataactcctctaccgtcaatccttcaggggcctgaggagattgtggaagaatggccagtttttttgcgacttcttttgatggctggcggtggatgtcttttccttctagtagcactgtaccgcttttcggggccatcagcctggcgagcgatttgaggattgttgatttaccgcagccattagcgccgatgagcgcagtgatttttccttcttctatctttaagtcgactccgtcaataatcactgtactgtcatatgaaagagtgagctggtctgcagccagttttcccatggtatcctctccctactgtttcctcgcttcgaatttcaataaatataagaaataaggcgcgccgatcacggctgtcagtattccggcaggtatttcaaccggaggcatgatgccgcgccctaacgtatctgcaattaataatataatagcaccaatcaatgccgatgcaggcagtaaatatttagctttttctccggtaagccgtctggcgatatgcggagcaagcaagccgataaaaccgattgagccgacgacggctacacagcttcccgccagcgccaccgcggtgaaaatcaggatgaatctcagccggtttgcgttttctccgagaccctgtgcaagctcatccccgagtgacataagatccagcttcggtatgagtatgcagacgatcggaaaaagaatcaaaagccatggcgcaagcaggttgacttcttcccagtttcttccccagaggcttcctgtcagccaaatgagtgcagcattcacgtcgcctggaaacttgaccatcatatattgcattccggcgtggcagaccgcgcctaaagcaatgcctgataaagccagtgaagagggctgaatgctcttttttcgggctatcattaataatagtacagcaataatggcggctccggcaaatgcggagaacggaagcacgtataccggcgactcaggaaagatgagaatcacagccatcgccgcaagtccggagccttttgaaatgccgacaacgtccggggaagcgagtggatttcggatcacaccctgtaaaatcgctccggcagcggcaagcccagcaccggccaaaatcgctaatataatgcggggaaggcgatattgctggatgataaattcaaaggaatgatccagtcccagcagattcgtcactaccgcatcaggtgaaatgtataatgcaccgattccaatgctgatgacggacagaacgattaaaatcacggccaatatgagtatcgccagtaaggggcgtttttgttttctggttgttttcttcatttcagatgtcgccctttccttgccaaatataagaaaaacggcgttccgataatcgcggtgacaatgccgaccggtgattcataaggaaatgcaatccatctggccagtacatctgcgtacaccagcaaaatggcaccgaacagtgccgaaaacggaagcacgtattgataatgttctccgatcagcttgcggacaatatgcgggacgagcagcccgacaaagccaatcggcccggcgacggctacggaagcgccggaaaggattaaaataatcaaactgatcagaatccggatgccgttcatattttgtccaagcccttttgctgtttcgtctccgagaccgagaacagaaacagaaccggaaaatacgagggcaagcccgatgccaatgacagaaaacggagcgatggttatgacgtcctgccagttgctgccgtcgattgcgcctgtcatccagtacagaacatcctcacctgactcatttaaaataatgatggcctgtgtcatagaggagaggaacaaatgcacggccattcctgacagcgccagcttaacaggtgtcattccgccggatgaggcaatcatatacacaatcgcgccgcctgctgccgcacccgcaaaagcgaatataacagatgaatagggcgatgccggcagaatgacgagagaagcaacgacaaaaagcgatgcacccgcattcacaccgaaaatttggggtgaagccagagggtttctggtcatagcctgcattagcgcccctgctacagctaggctggcgccgacaaaaacgccgattaatgtgcggggaaggcgaagagtagagatgatgagctgttcctttgaaccgtcccatacaaaaagatatttcaatgaatctatgatgccgatgtctgaggctcctactgaaagattcagcccaagcccaaatataaaaataatcagtgcaatgatgaacatcatcagtcttgatgatgagcgccgtttggctgattgatacaacagtctcacttccttactgcgtctggttgcaaaaacgaagaagcaaggattcccctcgcttctcatttgtcctatttattatacacttttttaagcacatctttggcgcttgtttcactagacttgatgcctctgaatcttgtccaagtgtcacggtccgcatcatagacttgtccatttttcaccgctttgagatttttccagagcgggttcgttttccactcatctacaatggttttgccttcgttggctgagatgaacaaaatatcaggatcgattttgctcaattgctcaaggctgacctcttgataggcgttatctgacttcacagcgtgtgtaaagcctagcattttaaagatttctccgtcataggatgatgatgtatgaagctggaaggaatccgctcttgcaacgccgagaacgatgttgcggttttcatctttcggaagttcggcttttagatcgttgatgacttttttgtgctcggcaagcttttcttttccttcatcttctttatttaatgctttagcaatggtcgtaaagctgtcgatcgtttcgtcatatgtcgcttcacggctttttaattcaatcgtcggagcgatttgtttcagctgtttataaatgtttttatggcgctcagcgtcagcgatgattaaatcaggcttcaaggaactgatgacctcaagattgggttcgctgcgtgtgcctacagatgtgtaatcaatggagctgccgacaagctttttaatcatatcttttttgttgtcatctgcgatgcccaccggcgtaatgccgagattgtgaacggcatccaagaatgaaagctcaagcacaaccacccgcttaggtgtgccgcttactgtcgtttttccttcttcgtcatggatcactctggaatccttagacttgcttccgccgcttccgttgttattctggcttgatgaacagccggatacaatgaggcaggcgagcaataaaacacttatgatggcaatcaacttgttagaataggtgcgcatgtcattcttccttttttcagatttagtaatgagaatcattatcacatgtaacactataatagcatggcttatcatgtcaatatttttttagtaaagaaagctgcgttttttactgctttctcatgaaagcatcatcagacacaaataagtggtatgaagcgttaccgtgtctttgagacaaaaacgcatgggcgttggctttagaggtttcgaacatatcagcagtgacataaggaaggagagtgctgagataaccggacaatttcttttctatttcatctgttagtgcaaattcaatgtcgccgatattcatgataatcgagaaaacaaagtcgatatcgatatgaaaatgttcctcggcaaaaaccgcaagctcgtgaattcctggtgaacatccggcacgcttatggaaaatctgtttgactaaatcactcacaatccaagcattgtattgctgttctggtgaaaagtattgcattagacatacctcctgctcgtacggataaaggcagcgtttcatggtcgtgtgctccgtgcagcggcttctctttaattttgatttttctgaaaataggtcccgttcctatcactttaccatggacggaaaacaaatagctactaccattcctcctgtttttctctttaatgttctggaatctgtttcaggtacagacgatcgggtatgaaagaaatatagaaaacatgaaggaggaatatcgacatgaaaccagttgtaaaagagtatacaaatgacgaacagctcatgaaggatgtagaggaattgcagaaaatgggtgttgcgaaagaggatgtatacgtcttagctcacgacgatgacagaacggaacgcctggcagacaacacgaacgccaatacgatcggagccaaagaaacaggtttcaagcacgcggtgggaaatatcttcaataaaaaaggagatgagctccgcaataaaattcacgaaatcggttttcctgaagatgaagccgctcaatttgaaaaacgcttagatgaaggaaaagtgcttctctttgtgacagataacgaaaaagtgaaagcttgggcataaagcaaggaaaaaaccaaaaggctatgacggccttttggtttttttgcggtctttgcggtggtattttgcagaatgccgcaataggatagcggaacattttcggttctgcatgtccctcaatttgctattatatttttgtgataaattggaataaaatctcacaaaatagaaaatgggggtacatagtggatgaaaaaagtgatgttagctacggctctgtttttaggattgactccagctggcgcgaacgcagctgatttaggccaccagacgttgggatccaatgatggctggggcgcgtactcgaccggcacgacaggcggatcaaaagcatcctcctcaaatgtgtataccgtcagcaacagaaaccagcttgtctcggcattagggaaggaaacgaacacaacgccaaaaatcatttatatcaagggaacgattgacatgaacgtggatgacaatctgaagccgcttggcctaaatgactataaagatccggagtatgatttggacaaatatttgaaagcctatgatcctagcacatggggcaaaaaagagccgtcgggcacacaagaagaagcgagagcacgctcgcagaaaaaccaaaaagcacgggtcatggtcgatattcctgcaaacacgacgatcgtcggttcagggactaacgctaaagtcgtgggaggaaacttccaaatcaagagtgataacgtcattattcgcaacattgaattccaggatgcctatgactattttccgcaatgggatccgactgacggaagctcagggaactggaactcacaatacgacaacatcacgataaacggcggcacacacatctggattgatcactgtacatttaatgacggttcgcgtccggacagcacatcaccgaaatattatggaagaaaatatcagcaccatgacggccaaacggatgcttccaacggtgctaactatatcacgatgtcctataactattatcacgatcatgataaaagctccattttcggatcaagtgacagcaaaacctccgatgacggcaaattaaaaattacgctgcatcataaccgctatcaaaatattgtccagcgcgcgccgagagtccgcttcgggcaagtgcacgtatacaacaactattatgaaggaagcacaagctcttcaagttatccttttagctatgcatggggaatcggaaagtcatctaaaatctatgcccaaaacaatgtcattgacgtaccgggactgtcagctgctaaaacgatcagcgtattcagcgggggaacggctttatatgactccggcacgttgctgaacggcacacagatcaacgcatcggctgcaaacggactgagctcttctgtcggctggacgccgtctctgcatggatcgattgatgcttctgctaatgtgaaatcaaatgttataaatcaagcgggtgcgggtaaattaaattaagaaagtgaaaaacacaaagggtgctaacctttgtgttttttaattaattaaaatgtttattaacttagttaaggagtagaatggaaaaggggatcggaaaacaagtatataggaggagacctatttatggcttcagaaaaagacgcaggaaaacagtcagcagtaaagcttgttccattgcttattactgtcgctgtgggactaatcatctggtttattcccgctccgtccggacttgaacctaaagcttggcatttgtttgcgatttttgtcgcgacaattatcggctttatctccaagcccttgccaatgggtgcaattgcaatttttgcattggcggttactgcactaactggaacactatcaattgaggatacattaagcggatttgggaataagaccatttggcttatcgttatcgcattctttatttcccggggatttatcaaaaccgggctcggtgcgagaatttcgtatgtattcgttcagaaattcgggaaaaaaacccttggactttcttattcactgttattcagtgatttaatactttcacctgctattccaagtaatacggcgcgtgcaggaggcattatatttcctattatcagatcattatccgaaacattcggatcaagcccggcaaatggaacagagagaaaaatcggtgcattcttattaaaaaccggttttcaggggaatctgatcacatctgctatgttcctgacagcgatggcggcgaacccgctgattgccaagctggcccatgatgtcgcaggggtggacttaacatggacaagctgggcaattgccgcgattgtgccgggacttgtaagcttaatcatcacgccgcttgtgatttacaagctgtatccgccggaaatcaaagaaacaccggatgcggcgaaaatcgcaacagaaaaactgaaagaaatgggaccgttcaaaaaatcggagctttccatggttatcgtgtttcttttggtgcttgtgctgtggatttttggcggcagcttcaacatcgacgcaaccacaaccgcattgatcggtttggccgttctcttattatcacaagttctgacttgggatgatatcaagaaagaacagggcgcttgggatacgctcacttggtttgcggcgcttgtcatgctcgccaacttcttgaatgaattaggcatggtgtcttggttcagtaatgccatgaaatcatccgtatcagggttctcttggattgtggcattcatcattttaattgttgtgtattattactctcactatttctttgcaagtgcgacagcccacatcagtgcgatgtattcagcatttttggctgtcgtcgtggcagcgggcgcaccgccgcttttagcagcgctgagcctcgcgttcatcagtaacctgttcgggtcaacgactcactacggttctggagcggctccggtcttcttcggagcaggctacatcccgcaaggcaaatggtggtccatcggatttatcctgtcgattgttcatatcatcgtatggcttgtgatcggcggattatggtggaaagtactaggaatatggtagaaagaaaaaggcagacgcggtctgccttttttttattttcactccttcgcaagaaaacggattttgaaaaatgagaaaatttcctgtgaaaaatggtatgatctaggtagaaaggacggctggtgctgtggtgaaaaagcggttccatttttccctgcaaacaaaaataatggggctgattgcggctctgctggtctttgtcattggtgtgctgaccattacgttagccgttcagcatacacagggagaacggagacaggcagagcagctggcggttcaaacggcgagaaccatttcctatatgccgccggttaaagagctcattgagagaaaagacggacatgcggctcagacgcaagaggtcattgaacaaatgaaagaacagactggcgcgtttgccatttatgttttggacgaaaaaggagacattcgcagcgcctctggaaaaagcggattaaagaaactggagcgcagcagagaaattttgtttggcggttcgtatgtttctgaaacaaaagcggatggacgaagagtgatcagagggagcgcgccgattataaaagaacagaagggatacagccaagtgatcggcagcgtatctgttgattttctgcaaacggagacagagcaaagcatcaaaaagcatttgagaaatttgagtgtgattgctgtgcttgtactgctgctcggatttattggcgccgccgtgctggcgaaaagcatcagaaaggatacgcttgggcttgaaccgcatgagatcgcggctctatatcgtgagaggaacgcaatgcttttcgcgattcgagaagggattattgccaccaatcgtgaaggcgtcgtcaccatgatgaacgtatcggcggccgagatgctgaagctgcccgagcctgtgacccatcttcctatagatgacgtcatgccgggagcagggctgatgtctgtgcttgaaaaaggagaaatgctgccgaaccaggaagtaagcgtcaacgatcaagtgtttattatcaatacgaaagtgatgaatcaaggcgggcaggcatatgggattgtcgtcagcttcagggagaaaacagagctgaagaagctgatcgacacattgacagaggttcgcaaatattctgaggatctcagggcgcagactcatgaattttcaaataagctttatgcgattttagggctgcttgaacttggggagtatgatgaagccattgatctgataaaagaggaatatgcgatacaaaatgaacagcatgatcttttattccataacatccattcgcagcaggtgcaggccattttgttagggaaaataagcaaggcatcggaaaagaaggtcaagctggtgattgatgagaacagctcactcgcgcctcttcctgcgcatatcggcttgtcccatcttattacgattattggcaatttaattgataacgctttcgaagctgtagcggagcaaagcgtgaaggaagttttgttttttatcacggatatgggccatgacattgtcattgaagtatcagacacagggcccggtgtgccgccagagaaaatagaagctgtgtttgagagaggctattcttcaaaggggatgaggagaggctacggtctggccaatgtgaaagactcagtgcgtgaactgggcggctggatcgaactggcgaatcaaaaaactggcggggcggtattcactgtgtttataccgaaggagaaacaaagggggaatccatttgattcacatcgcgattgcggaggatgattttcgagttgcgcaaatccatgagagattgattaaacagcttgatggattcaagattatcggcaaggcggctaacgcaaaagagacattggcgcttttgaaggaacacaaggctgatttgcttctgctggatatttatatgccggacgagcttgggaccgcgttgattcctgatatacgaagccgatttcctgaagtggacattatgattatcacagcggcaacagaaacccgtcatttgcaggaagcgctaagggcgggaattgcccactatttgatcaaacccgtaacagctgacaagttcaggcaggtgctgcttcagtataaagaaaaaaggaagctgctcatgtctcagccggaggtcagccaatccatgatcgaccatatttttgggaacagtgtgaagacagctttgccggcagagaatttgccgactggcattaattcgattacactgcgaaaaattaaggaagcgcttcagactgcgtcagaaggattgacagcggaggaacttggggaaaaaatgggggcgtcacgaacaactgcccgccgttatgccgagtaccttgtgtcaaaggaagaagcaagagccgagcttgaatacgggattatcggcaggccggagagaaaatattatttggcggcggattagatatgaaaaaatctataatcctattgattattctattgatctttactcagggtgatatcaggcaggcggctgcgccgcgcctgccggacgggccgatagaaattgtcgtccctgccgaaccttctggcggctgggatgtcacagcgcaggcgatccaatcagttttgaggcagaagcagatcgtgaaggatgatgttcatatcgtctataaatccggcggcgggggagagaaaggctggaaatatgtcaacaaaagcagcaaacaaaccatcagcatgacgtccagcttaatattgagcaatgatcttctcgggcaaagcaaattaaaaatggccgattttacgccgctcgccattctctccaaggaatggcagacggttgcattgccaaaaggatcagcgttaacaaatggcaaggatgtgctgaatgagatcaacatgcatcccggcaaggtgagaatcggctttgccccggggtttggcaatgatgatcagctctcgttcgtcagagcggcagatatgtacggcattgacccgtttgacattcaattctcacagtatgacagcagcgaacagctcattcaggcgctgatcagacatgagatagaagcggcttccatgaccctttctgaagcgaaaccatatgaacgaaacggcgatatcacgttagccgctgtaacatctgataaaagacttcccggttttccaaatgtaccgacgtggaaggagcagggaatcccgtttgttttttctcattggagaggaattttgggtccgaaaaatatgtctgaggaagagatttcttactgggatcaagcgctaaagaaggtcacctcttcacctgaatggaggcggaaaataaacgaacaggactgggaaagcttttatttaaacagcagggaaacgaaacggtttttagaagagcaatctgctttttatcaaagcatcatgacaggaaattaagatcccggcatccccgggatttttttcatgccgaaaattgatcaaaaagaacaaaacggttttaaaaaattaaaaatacaaaaaaaacaaattatttacttgcggttggttttcccatacgatggcaaaaaggcaagacaaaaaggggagtaagggagaaaaaaatgtaagcggattcatttaagggggaatggatgtgttagcaatcttaggctttctcatgatgcttgtgtttatggcattgatcatgacaaaacggctttctgttttaacagcattagttttgacgccgattgtgtttgcgcttatcgccggatttggatttactgaagttggggacatgatgatttcggggattcagcaagtcgcgccgactgcggtcatgattatgtttgcgatcttatattttggaattatgattgatacaggcctgtttgatccaatggttggcaaaattttaagcatggtcaaaggagaccctttaaaaattgttgtcgggacagcggtccttacaatgctcgtcgccttggacggagatggctcgacaacgtacatgattacgacaagcgccatgcttccgctctatttgctgctaggcatccggccaattatcttggcaggaatcgcgggagtcggcatgggaatcatgaacacaattccatggggaggtgcgacgccgagggcggcgagtgcgctgggtgttgatccagctgagcttacagggccgatgattcctgtcattgcaagcgggatgctttgtatggtggcggttgcgtatgtgcttggaaaagcggaacgaaagcgccttggtgtgattgaactgaaacagccagccaatgccaatgaaccggcggctgcggttgaagatgagtggaagcggccgaagctttggtggttcaatttattgttaacgctttctttaataggatgtttagtatcgggtaaagtcagtttaaccgtactgtttgtcattgcgttttgtattgcgctgattgtgaattatcccaatctcgagcatcagagacagcgcatcgcggcgcattccagcaacgtgctggctatcggttcaatgatttttgccgcgggggtgttcacggggattttgacaggcacgaaaatggttgatgaaatggcgatctcgctcgtgtccatgataccggaacaaatgggcggattgatcccggcgattgttgccttaacaagcggcattttcacattcttgatgccgaatgacgcgtatttctacggggtgctgccgattttatcagaaacagctgtcgcatacggtgtggataaagtggaaattgccagagcctctattatcggccagccgattcatatgctgagtccgcttgtgccatccactcatttgcttgtcggactcgtcggagtttctattgatgaccatcaaaaattcgcattgaaatgggcggttctcgcagtgatcgtcatgacggctatcgctctattgatcggtgcgatctctatttccgtatgataattcaggcgtaatgacacacactaacggcatacaacattccggaggtgtcattatgagtgatccttatatgccgctgacttcagtcagaagcggaacggggttcgaagcggcaaaaggggtgcacggcctgactgtgcaaattgcgaatgtctattttattcagctgccttctgaacctcactcatttgttttaattgatgccggcatgcctcaatcagccggcatgattgtcaatgaagccaaacaaagattcggtgaagggtttcagctgaaggcgattatcctcacacacgggcactttgaccatattggggcaatcgaagagatccttgagcattgggatgtgcctgtttatgtccattctcgggaaatgccttatgtaacaggtaaaaaggattatcctccggctcgtcctgacagcaagagcgggctggtcgctaagctgtcgccgctgtttccgcggcactccatcgatatttcctcacatgtccaggcactgccggaagacggttcagtcccttttcttgacgagtggatgtggatcgcgacaccaggacacacgccgggccatatttcgttattccgcgatgacggccgcgtgcttgtagcaggtgatgctgttattacagtggaacaggagaaaatggctgacgtcttgatacaaaaacaggagcttcacgggccgccggcttatttcacgcctgacacagagacggccgcggagtccattctaaagctggccggtcttgaaccggaagcgttattgacagggcacggcataccgatgaccggcaaaaactttcgaagtgacttaactgaattggcaaatcggttatcgtctatttgacacccgcaccacgcgggtgttttttattgttttccaggaagttgcagaaaaatcatttgtcttgccgcttaaaaacgatacaatgaaaagcatgaagtgatgtgaaggggagagtttgttggaagaaaaagaaatactctggaacgaagcgaaagcgtttattgccgcatgctatcaggaattgggaaaggaggaggaagtgaaagaccgtctcgaggacattaaaagtgaaattgacctgaccggaagctatgtacatacgaaggaagagctggagcacggagcgaaaatggcttggagaaacagcaaccgctgcatcggcagattgttctggaattcgctgaatgttattgacagacgagacgtccggacgaaggaggaagtgcgtgacgccctcttttaccatattgaaaccgccaccaataacgggaaaatcagaccgaccattacgattttccctccggaagagaagggtgaaaagcaagtcgagatctggaatcatcagctgatccggtacgctggatatgagtcagacggagaaagaatcggcgacccggcttcctgttccctgacagcagcctgcgaagagctcggctggcgcggagaacgaacggattttgacctgctgccgctcatttttcgcatgaaaggcgacgaacagcctgtctggtatgagctgccgcgttcacttgtgatcgaggttccaatcacacatccggacatcgagacgttttctgatttggagctgaagtggtacggcgtgcctatcatctctgatatgaagcttgaggtcgggggcattcattataatgccgcgccatttaacggctggtatatgggcacggagatcggagcgagaaacctcgcagatgaaaagcggtacgacaagctgaaaaaagtagcgtccgtgatcggcatcgccgctgattacaatacggatttatggaaggatcaagcgctagttgaattgaataaagctgtgctgcactcgtataaaaagcagggtgtcagcatcgttgaccatcatacagcggcaagccagtttaaacggtttgaagaacaggaggaagaagcgggcagaaagctgacgggggactggacgtggctgattccgccaatttcacccgctgccactcatatcttccaccgatcctatgataactcaatcgttaagccgaactatttttatcaagataagccttatgagtaaacaatagaaaatcgatgatggccttcaaggctgcgggattcagtcacagagatgtcggtaacctttgagaaagggcttccgttctttacagcctcaacaaacgattgcagggcgttttccggaccctctgccaaaatctcgacacgcccgtcatcacggtttttgacccagccggccagttttcgcttatcagcttccatttgaacaaaatagcgaaagcccacaccttgaacccggccgtctacaatgattcggtattgaagcatgtaaaaaccaccttttctttttatgataatcaatcattttacaacctgtaaaggggatgtgtttgtatgaaaccagagcgctattcagttctttctcttaatctgggaaaaccgcagacgcttgaatatgacggaaagaaaatcgataccggcatcatgaagcgtccggctgaatcagccgtcatgctgtatcgggagaattttgaaggagacggacaggcggacctcgtcaaccacggcggacctgataaggctgtctgtgtctacccggcggagcattatccgttttgggaagagttcctctcaagaccgctgtcaaatgccgcatttggagaaaatctgacggtcgcgggcctgactgaggagaatgtttgcatcggggatgtgttcaggcttgatgaagctgttgttcaggtcagccagccgcgccagccgtgtgtaaagctggcgaaaaagtttggtgtaaaagaaatggtgctgaaggtccagcaaaccggctatacagggttttattttcgcgtgctggaggagggcagggtgtctcccggcgcgaaccttgaattgctgtccagaggagagaagggcatatccgtccagttcgccaaccgcatcaactaccatgatgcaaaaaatctcaccgccattgaacggattttaagtgaggctgcactatcggaaagctggagagcgtcctttatgaaaaaaaaggacaggctgctgccggttgaatagaaaaaagccgcgcatatcaacgtgcgcggctttgccatatttaagattgttttttctttgtttcaagcaggttggcaagaaaataggttttatagctttgaagctttcttccctcatggtgcgtgatcccctgcttttttagttctgccacataccagcctttactgccgtaatgcatgtcagaaaactcctttccctatctgatttcgaaacgattggcattgtaacatctataaaaagatgctgaaaagagatgcggggaaaactgagcctttcgaactagatgtgcgaatgttcttctgtatgtatatgcggagcaaaagccgaatatgatttaatggccggttagtttgatcatgacaacgccaaatgtcataatggcgaaaacaatgccgatatatgtgagcatcccgttttttttcttaacgccgtaaacggttataatgatgccttcaatgaaaaaaatgatgccgaaaataataaaccacatgcagataaaggctcctttcacagacataatagtagtgtagcatatctgaaagagccgggctgtgataatatcaagaaagccgggcgcatatcgcccggctcatgttttattgtttatcaaccaatttgaccagaagctgtgccaaatgttctttctcatcttcgtccgcaacgctccaaagctcttgcagcagcatttcttcaccgttttgcggctcttcatgctttgcgaggtagtctcccaggatcgcagcgctttttacaagcttgccgtcatccaatcccagctttttgcctcggttgacttgttttttcaggtagcctttaaattcatcaaagtcttttaaaatgtcttcttttattgtgccatgcatcgcgttcatttcgttttcaatttggattttttcttgatctctgttcattgcaagacctcctcgtgcagaataatgatgttttacctgctattggaggaggttaaacctgccggaagcccggaatgtgttttacagtttcgtcaggataatcggttcatcttttgtgatgacgatcgtgtgttcaacttgggcaaccatgcttttatccggcgtcttgaacgtccagccgtctccagcttcaacaatcgtttctgctttcgttgaaataaacggttcaagcgcgatgactgtgccatttttgaacagtgcgttatcaaacggatcataatagttcatgatgtggttcggcgcttcatgcaggcttcggccgattccgtggccggtcagggttttgatgacggtaaagccttgagagcgtgcttcatgataaacggctcttccgatctggttttggcgcttgcccgcttttgcctgctgaagccccttttgaaaagcgttttccgcgcattggcaaagcttatgaaggcgttcttctccttcaccgagcacaaatgagatgcctgtgtcggaatagaagccgccaaattcagcggagatgtcgatgttgacaaggtcccctgcttttaaaattttggatgtgcttggtatgccgtgagccacttcatcatttacgctgatacatgtcacacctggaaaatcgtattccttctcaggagctgaaacggcgccgtgctcatcaagcacagcttttccgataaggtcaaggtcttttgtgctcatgccgggctctgccttccgcttcatttcttcacgcgcaagcgcgacgattcttccgatttttttcaggccttctaattcttgatcgtttgttacaatcatctgtcattcccgctttctttttaaataatctagattaagcttaccacaactgtcttaaaaataggaaacacacggacctgggaaaaaagaaatacccccgggaaaattggtatagatcactagatatcttatatggtatatttgaaaaaaaagggtatgaggggatgggtatgctttcatttttacaaaaactcgggaagtcatttatgctcccgattgcggttctgcctgcggttggaattatccttgcgcttggcagagaggatgtatttaatatcccgtttgtctatcaggcggggacggcggtttttgatcatctgccgcttatttttgcgatcggtattgccatcggcatttcaaaagacagcaatggggccgcgggtttatcaggggcgatatcgtatctgatgcttgacgcggcaacaaagacaattgataaaacaaataacatggcggtgtttgggggaattattgccggtttaattgccggttacacctataaccgcttcaaggataccaagctgcctgaatatctcgggttcttcagcggcagacggcttgtgccgattttaacagccattattacgatcattttagcgggcatattcggagtcgtctggccgccgattcaatcgtgtatcaactcgtttggagagtggatgctcgggctcggcggcatcggggcaggcatattcggccttttcaacaggctgttaattccgcttggccttcaccatgtgctgaacaatattttctggttccaattcggagaatataacggagtgacaggggatctggcgcgctttttcgcgaaagatccgacagcgggcacatatatgaccggattcttcccaatcatgatgttcggtcttccggcggcgtgtctggctatgattgtgactgcgaagccgtctaaacggaaagcgacggctggaatgatgattggatttgctttaacagcgtttatcacagggattacggagccgattgagtttgcatttatgtttttatctccgcttttatacgctgttcacgcggtcttaaccgggttatctttatttatcgtcaactggctcggcatccgttcaggcttctctttttcagccggagctatcgattatgtgctcagctatggaatcgcagaaaaaccgctgcttctgcttttggtaggtatatgctatgcggcagtatactttatcgtgttttatgtactgattaaggctttgaatttaaaaacgcctggacgggaagacgatgatgtggatgaagtgctggatgaaaatactgttcaggatgtaaatgaaaacatcatgctgaaagggctcggcggaaaagaaaaccttcaaaccattgatcattgcgccacaaggctgcgactgactgtgaaggataccgctttggtggatgaagcgctgctaaagaaagcaggcgcaaaaggggttgtcaaatcaggggggcaatcggttcaagtcattattggcccgaatgtggaatttgcggcggaagaattgagggctgctgtcaaataaaaaaagcggagagggcaacctctccgctttttcttatttatcttcgttatcctttgacgtttcggaagaatcttcgtcatgttttgtgtaatcataatcagaaggattcaccttcttaaaacctttcggctcgtagaaccgcagcaggtctccgtttatgattttatcggacatttcaagttccttcttgacgagcgagtcttctgacttgtcgacttcggattcatcgagttcttttccggttttcgtgtcgtaatacttaccggatattttcgtgtacttcggtgaaataaagtctccgtttcggaacggaatcacttcacggtgttctttcgataaaatatcagaaccggacatcagatagtccttcgtatccactccgagcagatgcagaatggtaggagccacatcaacgtctccggcatatttatgaactttctcgcccttcacgccggcagcgtggataaagagcggcacccgttgaagctgggcgttgtcgtaatcagtgatttcatccttgccaagcactttcgccatcgctttattgtggttttcagagatgccgtagtggtctccgtacatcacaataatcgatttatcatataacccgtcttttttcagatcattgaagaattgttcaatggactgatcaaggtaatgggctgactggaagtagttatcgacgacagagtcaccaaagtctccagccgggaagtctgtatccccctcatccattccgaatgggaagtggttagacagggtaatgaacttcgtatagaacggctgcggcaggctttccagcagcggcattgattctttgaagaacggtttgtctttcatgccgtagtttttcgtgttttcttcgttcatgtcatagtaagcagaatcaaagaatttatcaatgccttccgccttgtacatttcgttacggttccagaacgtctgcgtgttcccgtggaaagtagcagatgtgtaattcttagacttcagaatcgccggaacggattgcagcgtgttttgcgctttgtttacgaaaactgaaccttgagccagcgggtacagagagttttccatcataaattcagcatcagatgttttaccttgtcccgtttggtggaaaaagttatcaaagtagaacgtttcgttatcatgtgccagtttatttaagaacggtgtcacttctttgccgtcaattttatagtcgatgataaatgactgcaaagattcaagtgaaacgtaaatgacgttttttccttccgctttgccgaaatacacgttattcggcacatcgtaattggctttcatgtagttttccacttccgtcacgtcgctggaatcggcaagcgcgcgctggctgttggacttgatattctgtacagcgtcataaatcgtgaaattgtatgttcccaagtatttcacaagatagttccggtcgaatgatcttgtcagcaattcaggacggtctgattccgcaactgccagattgatcaagaacacaagaattgaagacgcaaaaataattcggaacgattttttgcttgacgtttcggcaggcttgtttactttgatcgccaagatgatcaggatgatcgtatcgataaagtaaaaggcgtcagtcggtctcatcagcgaaaatgcgctgtcaccgagttggccgccgtttgttttagcctgcataatgaccggaattgtaataaaatcattgaaaaatctgtagtacacaatgttggcgtacagtaaaaaagacattaaaaaatgaatcactataatggctgtctgctgtaattttttcttgaacaagagtccaaagccaagaaagaacaagcttgagctaagaggattcacaaaaagcaatattttttgtatcgtgttgtctattcctaagttgaagttcaggacataaccgacatacgttttgatccataacaggacgaccgcgattaagaagaaggccagtcctctttcttttataaatgttttcattgttacactccttttttccgatccagttcgagcgaaacgatagaaaaaacgaacgtatccaatataacacgaatcagcagattagaaaagtgaaaatcgtatgatggagaaagtggcgaaaaacgccgtcgaatcaacgtttcgctttgatattaccaaatgtaaaacaaggtatctttctagaaatagaggaataaaatggtacattgggaattgtatgataaaatataaggtatagataaaaagaggtgaaatgatggatttttcccatattgtgtctgaagataaaattaagcgcgccatcaaagacggggactttcaaaacctcccgggaatggggaagccgctgccgaaggatgacgcggcacacttgccggaatcgctgcgcatgggctatcgtattttgaaaaacgcgggaatggcagaggacgagggcgcgctcaaaaaagagcttatgaccatcgaccatttaatcgaaaagtgctatgacgaaaaagaacgcgagcaattaatcagaaaaaaatctgaaaagcaattgctgcttgataagcttgtcgacaaaaaaggcatgttttcaaagccagcatccgctttttataagaataaagtatatgatcggcttggacgaaacagaccttcttccagctgatttgtcttgtctgcaggatggcgattgataatagccatcctttttatgttccaagttctatgtcaaaaggtttatgtttttccatctatgggaaatgattcataaacgaaaaaagggtgatgggatggaacgactattagtatggatagagcatatatctgattggctgtggggtccgccgctaatcatcctgctgacggggacgggcttgtatttcactattttgctgaaaggttttcaatttcgctatcctttatacattttcaaacagacaatcggcagcgtaggaaaaaagccgaagggagagggcacagtcacaccgcttcaggcattgacctcagccctcagttcaacgatcggtgcagcgaacattgtcggtgtgcccgccgctattatgtttggaggaccaggagcggttttttggatgtggcttattgccttatttgccatggcgattaagttttctgaaagtgttcttgctgttcattacagagaaaaaaatgagcagggtgaatacgtcgggggaccgatgtattacataacaaaagggctgcgcatgaaatggctcggcgtattcttctctgttgcgctgattgtggagctgatcccaagcattatggttcagggaaattcggtttcagtctcgcttgccgagacgttttctttcaataaaatatacgcaggaatcggaattgcatttttgattgggttagtggtgataggaggggtaaagcggatcggaaaagtaacagagtttgtcgtgcctcttatggcaggggcatacgcaggtgccggtctcctgattgttctcatgaatctatcatcagtgccggcgtttttctctctcatcttttcaaatgcgtttacctcttcttcagcagttggagggttcgcaggtgctgcgttggcggaaaccgttcgctggggatttgcccgcgggctgtattctaatgaagccgggatgggaacagccccgattgcacatgcggcagcaatgactgatcatcctgtgcggcaagggttttggtctgtgatcggcattgtcattgacaccttgatcatctgcacgaccaccgcttttgtcgttcttgcatctggtgtctggacagggaagaacgcctcaattgacccggcagcactgacgacggctgcatttcagcattatttcggttctggcggagggtacttcgtttcggtttccctagtcttctttgtcgtatcaaccattatggttgtcattttttacggcgtaaagcaagctgaatttctgttcgggcggctggcaggacacgtgattaaattcgtttatttagcggctattatcattggtgccgcaggcggagcaaaagccatttggggctttttggacttagcattggcttttattctcgttccaaatgtgattgcgctgttgttattgagcagaaaggtaaaagcgctgtacaccgaattctttacatctgaacagtactacctgaaagatataagaaaaacaaaacagaatcctgtttatcaaacaaaagaaactaaaaattcctagtgctttgctttggcgctgaacaacgctttgctttttatgatcaaataaatgagtaaaggcagcaaaagagaaatcactacattaatgattggtttgattctgttaaagtcgattagctgatttgtatttaaaaagaaccaaaagccgcatacgactgagaacatgccggttggtgtatacatggctttcgggtcgatttttgagtgtaaaaacgaaaggccgtataccacgatatatagggaacctgctatcttcaccataatgactggaatccaaaaagccgcgatgatcaggtctgagcgatccagaaaatccgtaatgcggatctgcctgatgaccatataagcaggatcaaagaaagtagatgtcaggttgggaccaaagacagaaattgaagaaaataacatcacggccagcaataaagcgcccagcagtatcgcgaaaatggtgtattttagcgggacgctccggtttgagaagagaagcggaaggataatcaattcccccattgtcccaaacgcgtaatagcctgattgaaggtatgggattagaccttcaaaaacaggtgtcaagttttgaagctcaatttgtgtggccagcgtaaatggaaggcacaagaccaggatgccgaatggaaataggaatatctgcgccattctggtcaatgtttcttttccctctctggcaatacagatcgccacaaagataataacaccgccaagaacagccattggtgttcttgggagaaataaaatgttaatcaaattgatgaaaaaacgtatatcatgagcattgattaacaggaaatacaaagaaaacagtaaaatgataatccggcctgcgattggtgaggaatcgctcagcagctcatagatatttttatcctgatgctttttcatcagcctatgcatgagccagagtgccggaatcacgaggacaacgccgaggatgtagctgtgccaggcattttgtttagctgattcgatcatgagaatcggagcatgctttaatccgactgctaacgtatacagagctccgaaaaataatccttggtatgcagaggtcttgtccataaagcacatcctttctgtcatgttcaaaacggaatatatttaaacaggtgccccagccgcggaagcaggggattcactctcatataaatccatagaaaagcacttcctgcaatcagcaggctgaaggcccattttgttagattgttagcggaacgaaaattcttccattcatatgcgtatatggcaatgcacacaatcaatgtctgtacgatatagctgatcatgctgacgcacctccattaatggctgatcgttttgtataggacaccgccctgctcaatcgtcacaattgggacgacgtgaacctccatatccttatatacctcttcccattcctttttcagcagattcttcgtggttgccgtgcttctgatggtcctgtcttgaaagccggccgggtccgcctttagcttttgcaaacgatgaacggtgctgatcacgtccttctttatggttctgtttagtgctttttgaatgatgtaatactggtcattttctctcgtctcataggttgattggttttccataataattcctttggctctgatctcgattgtcattgacagctttccgtttttttcagcggcatgaaaggatacattggacttttgaagctgaatggatgcttgtcccatttgattcggcaggtctactatgaattctggctggcgggcttgattcagcaacatcagggctgctgtcatgtgtacatctttgaaaatatccatcaatctgtcctttttaaagatcgcaagcccgtcaattttcaaattagatttgcctttccctccaggttttgttttagatgcagagatgaccggtgcatacggatcactgcctatttctactagatcagacatgaatctgcttaagaaaacgggccggctcgttgcgataatggccagctcccgaatcatttccgccggaaactgttcaagctgaacatcggtgtttaaaatgtcccgcgcttctccccggctgactaaaatgagcgccgttaatctgttctgcggatttcgcgttaaaatatcaaagactggggcaacgccgtctctcgccatatcctctccaataatgactgtacgtctgtgggacgtattgattgtccgtgacaaggaggtttgcagcttgttgttcgcttctctgatcgtagtgccggaagctgaatcaacataccatgtttttgaaccggcagttccgccgccgccccctgtttgtccgcctaattgaccgaccaagggaatctgcatggccactcgatactgatcttttttcttatcaatggctgagctgacaacaaatgcaatgtcattgatttctgtccggtcccagcaccccgttagaaggatacaaatgagaagcggcaaaacacacttatatattgttttcttcatcttttgggtcctctcttttcgctcccttctgtccgttgccgcgcgaatacgtgcccggccttctggtcatcgtccaccaaggcgccctgacaaaaatatcttttacttcatctcgtttaaacggagaaatcccggataaataaggaataccgaaagattgcagcttgcataaatggagcactaagataatcgtgccaagcataatgccgaaaatcccgaaaatactcgccaaaaacataagcgggaaacgaagcatcctgatggagatagctaagttaaaccgcggaattgtaaatgacgcgatccctgttaacgatacgatgatcaccatgggggcagacacaattcccgcttcaacagcggctgtcccaatgactagggccccgagaatactgacggtctggccgatggttttcggcaggcgcactcccgcctcacggagagcctcaaaagaaatttccataatcaatgcttctatgatggcggggaaaggaatcggttcacgagcggaggccacactgaacattaagtttgtcggcattaagtcctgatggtatgtaataacggcaacataaatagccggcaaatataaagcaacgaataaaaacatatagcgaagccagcggattaagttagacatcaaataacgctcatagtaatcttcactggcctgcataagctgccaaaacgtaatcgggcctgttaagacaaagggcgtattatctgtgaaaatggcaaatcggccttcgagaagctgggcggcgacagtgtccggcctttctgtgtattgcagctgggggaatggcgagtacgtgtcgtcttcgataaactcttcaatatatccgctttctaagacagcatcaatctttatctttttgattcttttttttactttgtcaatgacctttggatcggcaagcccgtcaatataggccaagacaacatcggttttggttttcgtgccgattttaaacgagatcattttaagctgaaacgttttgacgcgaaagcgcacaagagcggtattgaccctgaggctttcagtgaagccctctcttgaccctctgatggtcgattctgttatcggctcttcaatgcttcttctttgtccgccttttatatttaagatcaggccttttgagtgcccgtcggcaaataaaaccgcgttcccctcaatgatagatgcagccactttactcatactcgtttctgttgcaacacttgaaattgatagagtattttgcagcgcctcttcatgttcatctatttgatccgtcaaatgcgttaagaaagggcggagggcgtgatcctgaatatgttcagattttacaattccttcgatataaacaataaatccgcacagcccgtttccaaagtcaaattgtctaaatacgatgtctgagcagccttctgttaataaggtcagattatcgaggttttccttcaaattgggagagatcggtctgtcctgattgtcttcaagctctttgatgagctgaagcgctttgtcgcgtttattcatagaggctcaccctgctttttaatgtcatattcaataagtgcttgtgacttttagggtaaccttgtctgtttcatatattccagactaggatgaaagcgctataaaaaagtgttgactacctgtatatacaggaatacaatatgattataagttgtatatacaagttataaaaacggatacggaggggttggcatgggggaactgaacaaatcggcacgtcagattgtcgaagcagtcggcggtgctgaaaatattgcagcggcaactcattgtgttacacgtttgcgttttgctttaatagatgaaagcaaggttgaccaagagatgcttgatcaaattgatgcggtaaagggatcattctcgacaaacggacagtttcaggtcgtaatcggccagggaactgtcaataaagtatatgctgaactggttaaggaaacggggattggcgagtcaacaaaggatgaagtgaagaaggcctcagaaaaaaatatgaatcctttgcagcgtgctgtgaaaacgcttgcagacatttttattccaatattgcctgcgattgtcacggcgggtcttttaatggggatcaataacattttaacggcggaaggcattttcttcagcacaaaatcgattgtgcaggtttatccgcagtgggcggatcttgctaatatgattaacctgattgcaggcacggcctttacgtttttgcctgcgttaatcggatggtctgcagtcaagcggttcggcggcaatccgcttctcggcattgtgctcggggttatgctcgtgcatcctgatttgctgaatgcgtggggatatggcgcggcagaacaaagcggagagatcccggtatggaatctattcggcctagaggtgcagaaagtcggctatcagggccaggtgctcccaattttgcttgcttcttatatgctggcgaagattgaggtatttttaacaaaacgcacacctgagggcatacagctgctcgttgtcgcaccaattacgcttctcttaacgggatttgcctcttttatcattatcggcccgattacatttgcgatcggtaatgtactgacttcagggcttatctcggtgtttggttcttttgccgcactgggcggtctgttatatggcggtttctactcagcactcgtgattaccggtatgcatcacacgtttcttgcagtcgacctgcagctcatcggttcaaagctcggcggcacctttttatggccgatgctggcgctttctaatatcgcacaaggttcggcggctctggccatgatgtttatcgtgaaggatgagaaacaaaaaggcctctccctcacatcagggatttctgcttatcttggcattacagagcctgccatctttggggtgaatctgcgatacagattcccgtttatcattgcaatggtcagctctggcctggccggaatgtatatttcttctcaaggtgtgctggcaagctccgttggtgtcggcggcgtgccggggattttctcaatcatgagccagtactggggcgcgtttgcaatcgggatggctattgtattgatcgtgccgtttgccggaacatacgcgtatgcgagattcaaacataaataacaaatggggagcgggacgtgttgaacgttcccttttcccattttcaatttaaatatggtggtggagacagatgaaaacagaacaaacgccatggtggaaaaaagctgtggtttatcaaatttatccgaaaagctttaacgatacgacgggaaacggtgtcggcgatttgaacggcattattgaaaagctggattacttaaaaacacttcaggtggatgtgctttggctgacgccgatttatgattctcctcagcatgataatgggtacgatattcgtgattattactcgatttatcctgaatatggtacgatggaggattttgagcggctagtgtccgaagcacataaaagagacttgaaagtcgtcatggatcttgttgtcaatcatacgtcaacagagcacaaatggtttcgcgaggcgatctcttccatagacagcccgtatcgtgatttttatatatggaaagacccgcaggaaaacggttctcttccgacaaactgggaatcgaaattcggcggctcggcatgggagcttgacgaagcatcgggccaatactatttgcatctgtttgatgtgacgcaggctgatttgaattgggaaaatgaagaggtcagaaagcatgtctatgacatgatgcatttttggtttgaaaagggaatagacggctttaggcttgatgtcatcaacctgatttctaaagatcagcgctttccgaatgcggaggaaggcgacggccgctctttttacactgacgggccgcgggtgcacgaatttctgcatgaaatgaacgaaaaggtgttttcacattatgacagcatgacggtcggtgagatgtcttcaacaaccgtagaccactgcatccggtatacgaatcctgacaataaagaacttgatatgacattcagcttccatcatctcaaggttgactatcctaacggcgaaaaatgggccttggcgccgtttgattttttgaagctgaaggagatcctatctgactggcaaacggggatgcacgcaggaggaggatggaacgctctgttctggtgcaatcatgatcagccgcgcgttgtatcaagatatggagacgatggcgcatatagggtgaaatcggcgaaaatgcttgctacggccattcatatgatgcagggcacgccttatatttatcagggcgaggagctggggatgacgaatccgaagttcactgacataagctcctatcgggatgtcgaatcgctgaacatgtataacgcctttaaggaaaaaggaatggctgatcaagatattacagccattttacaggcgaaatcccgtgacaattccagaacccccgttcagtgggatgctacggaaaatggtggttttacaacgggcacaccatggataccggttgcaggaaattaccgggaaatcaatgctgaagcggcgctgagggatcagaattcggtgttttaccattatcaaaaattgattcagattcgcaaaatgtatgacattgtgacagagggtacgtatgagataattgcaaaggatgacccgaacatttttgcgtatctcagacacggcagcaatgaaaagctgctcgtgatcaataatttttacgggacagaggcggcctttacactgccggactctttagcgcctgacgaatggaaggcagaggtgctgttgacgaacgatgaagcaagggaagggcttcagaacatgacgcttcgcccgtatgagtccattgtttatcgtttaacgaaaccgtgttaaactaagctgggtggtccataatgaaggtgaataaattcatcacaatttataaagacatcgcacagcaaattgaaggcggccgatggaaagcggaggagattcttccgtctgaacatgagttgaccgcacagtacggtacatcaagagaaacggtccgaaaggcgcttcatatgctcgcgcaaaacggttatatccagaaaatcaggggaaaaggctccgtcgtgctcaatcgtgaaaaaatgcagtttcccgtttcgggccttgtcagcttcaaggagctcgcgcaaacgcttggcaaagaaacgaaaacaactgtacacaaattcgggctggagcctccgtcagagctgatccaaaaacagctccgggccaatctagatgacgacatgtgggaagtcatcaggtctagaaagattgacggggaacatgtgattttggacagggattattttttcagaaagcatgtccctcacctgacgaaagaaatttgtgaaaactccatatatgaatatatagaaggagagctcggtctttcgatcagttacgcccaaaaagaaattgtcgccgagccgtgtacggacgaggacagagagctgctcgatttacgcggctatgaccatatggtcgtggtgagaaactacgtctttttggaggataccagtttgtttcaatatacggaaagcagacaccgtctcgacaaattccgatttgttgattttgcgcggcgggggaaatgagagaggcgcctgcctgcggcagcgcgcttttttgtttggtatcaaaattgatactatccaacaaaaatgtgcgtacttttactttttatcataatggctacaatagagatgtgagtaatctaaaggagaggtgttttacatggcagatctaaagacacaaattctggatgcatacaatttcaggcatgcgactaaggaatttgacccgaataaaaaagtgtcagacagcgattttgaatttattttagaaacaggaagactgtctccgagctcactcggccttgagccttggaaatttgtcgtcgtccaaaatccggagttccgcgagaagcttcgtgaatacacatggggcgcgcaaaagcagctgccgaccgcaagccatttcgtcctgattcttgcgcgtacagcgaaggatatcaaatataatgcggactacatcaaacgtcatttaaaagaagtaaaacaaatgccgcaagacgtgtacgaaggctatttaagcaaaacagaagaattccagaaaaacgatttgcatttgcttgaaagtgacagaacattgtttgactgggcatcaaaacaaacctatatcgcgcttggcaacatgatgactgccgctgcgcaaatcggtgttgattcctgcccgatagaaggcttccagtacgatcacattcaccgtattcttgaagaagaaggccttctggaaaacggaagcttcgatatttctgtgatggtggcatttggctacagagtgagagaccctcgtccgaaaacaagatctgctgttgaagatgttgtgaagtgggtttaaataaagaaagctgctcgctaagcgagcagctctttttttatgcctgattcgctctattctgttttctcctctgatgtaagtacattgccgttccgagtgcgctgataagaaatccggccaataggatcgagtacatggatgtggctgtgtccggaagcaggccgccagccggaccgtctgttcctgatccgcccgaaccgtttcctccagagccgttagtcggttgagtgccaggaggcgtatcatttcctccgtttccgtcagttggctgttttccgcctggtttgtcggagccgccgccatgattgccgtcatcaccgcctgtcggttggtcggacgggaatgccggcggtttgttgttcgaaccggaatttaagatcgtgtattcgctgaagtggtttgtatatcctgtcaccatatcatcgtcaactgatccgttatctgtctttgtgaaagctttctttttcctgtcgacatgataaatggcagggttatgggcttcttcaatatcaaacatgcgaagcgaaagctgaacgggctccttgaatgattttatttcttttcctttttgctttactgtaaagtcatatacatctgccaatgacacattcaattctcccgtcgacttgattccgattgcagtgtctgcagttttaaggttcgccattggcatcttcatgctgtaccagtagttgaacaccgtcaatgaaggatctgactctctttctttcaaaagtttgacctgatctttttttactttgagattgataggcttctcttgagatccttcatgtgttccataatagacaaatggcgtgttggcatttttagcgtaaatcgcaaatttgtcttcatcaagtgtccagctgccgtcctcctgctttgtcggcaggaatacttctttgatccgtccttcaactttaggagagaccttgtttcctagttttttcagctgttcggtgaaaatctcataatcaacgtagccaaggtcttcaccatgggaggcttctgtaaagacagaatatccgtctcctccggcaccaacaaaattatttgttgccacgcggtaggtatcatccgtatttatagcaactttgtctccgttaggcgattcaattttcacttctaacacacggtgtccaggtttgttgtttaatgtaaaggtatattcgattccggccacctgagggaaagcgccgccgccattttccacattgcttaggccttgttcaagggcttctttaatttgttttccggttaaatcggccacgtaaagcgtattgccgaacggcatcacgttgagcacctcgccgagtgtgatatcacctttgtcaatgcctgctctgatgccgccgccatttgttatcgctattctggcgccggctgcttctttcgcttttgccagcataccgtccgcgatgaagtttccgagattcgtttctttcgtgcgcacatgctcacgctggccgtcaagcgccacatccgtgtagccgactttttcattttttacgtcctctaattcatttttgaactgatcgagctcttgttttgcttctgggttttcttctgtatgttcatcaattggcagcacgctcagatttgatttatctgtttgcacaacgcctttttcatcaaacgcgacatcaacgcgccccaagaattggccgtattcttttgcctgtgccacgatcgtcggttcttcgttgtttacgacctccattttgtcaacgagggtgtgagtgtgtccgccgatgatcaagtcaatgccttttacttttttggctagctcaagatcacggttatgaccgatatgggttaaagcaataattttatttacctgttcttcttcctgaatcgctttgacggtgttttgggctgtttcaaaggcatcattgaatacgatgcttttgcccgggcttgatgtggtggctgtatcttctgttgtcaggccgaatacggcgactttctccccgtcaacgtctaacagaatgtaaggatggatgccggcctccttcttttcacctgccgtaaaggtttgcggctttttgacaaatgatttcagcttggactcatttgtcacatctacgtttgcactgacaatcggaaattccggcgcttcaaagtgatagcggttcgccggatcaacggttgcgctgtttccgcttagaaaatcagaaagcactgtcgggcctttgtcaaattcatggtttccgaaggtcatggcgtcatagcccatcatgttcatcattttcagatcggccaaaccgttccatttagtaaaatacagatcgccggaaaacacatctcccgcatcaaggagaatattgtgatttgtttcgctgcgtacttcgttgattttcgtcattcgtctcgctgcatcatcgagatgtgcgtgcgtatcattggtgtgcatgacggtcaggtcccacagtccgtctttaggaggatctggatttgaatcatcatcgaattgcagcttatacacaccatagccttcattcgcagacttgcctacataagcgacatcgtctgctttatcggcaaatggcttggccaaaagcgaggattcaaacgtcagattcgtgccggaaacaggcgcgattgaccagttgttgtctgcttttggattgactgttttttgttcaataatgtaatccatcagcacctgcctgttttcaaccgcagagccgtggacaattttattgctcgtcagatgagggaacccgccgcctccggacgcacgatagttattggtgactacgagaaattcctggcttgggctgatcggcttgccttcataggaaaggttgatgatacgggatgaatccgcattgatcacttttccgttctcattgtatttagccggttttgtcacatcgacctgatatgtgacaccgtcaatcacgtcaaaattataggaacggaaattctcgttcagcaaggcctgatcgccgcctttggctggatcaatttgattgaattggcctgccgacatctccagccagtccttcacttcgctgcctgtcagcttgacgatttgaacagtattatcgtaaaggtacaagtcaccgacatttttaatcgcaagatctccggctggaatgtttgtatagtaattggctccatttctgccgcctgctttaaacggcgctccagcggataaaatcggcaggttcttgtactcggtatccttcatttctttttcggcataccatttttgcgcgtcagtcacgatctgaatggaaggatcatctttgacctgtgcaaagaagctgttaatatctgcttcggttttgccgactggctttcggacatactccagtgtgttttggtgtgtttgctgaatggtgtttgtaacggtttcgtttcttgatgtgacgttgccagcaatagattcaatacttcctttggaatctgctaccttccatgagccgtccgccttttcaagcttgaggtcaatcacgcctaaatatttgccccagctgcttggcatgacgacaggaatgccgttaattgttcccttttccacatcaaattgagcaacacccgcatactcggaggaaggaaagagtccgtgctgatggcccgagataatcgcgtcaatgcctttcgttttagtggcaaggtcaaacacggcgttttctgcgcctgatgattgtgactgcttttcaatgccggtgtgggcgagggcaataatgacatctgcgccttccgccttcattttcgggatcgtttcattggcggattctacgatatcctgcacctgaacttgcccctcgagattctttttgtcccatgtcatgatttgcggcgggacaaagcctatgtagccgacttttactttctgctcattaccgttttcatcaatgagggttttttcattaatcatatacggcgtataacggttttcgccgctagttgttttgacgttggcatttacaatcgggaaatcggctcctttgattgtgccgtcgagaaagtcgagcccgtagttgaattcatgattgccaagcgttccggcgtcgtatttcagcgcattcatgacgctgataatcggatgggttttcgcgccggagataatatcgtctttttgatatttcaccgcgtattcacccagcggattcccttgaatcaagtcgccgttatccacaagaagggtgttagggttttgcttgcggtgcttttggatcaattgcgctgttctcgccagaccgaaatccgccgtttctttgtcgctgtagtaatcgtaatccatcatgttggcatgaatatcagtcgtagccaaaatactcagatgcacctgaggagccgcgctttcttctgcatgaatgggtggtgttgggaggattaggctaagtatcataattgggggcaaaagaatacggagaatgtttctgacgtgtgttcgtcttttctgtattctcaccagttctccacctttcaacgaaatttgtgttacagctcctattgtaagaatattttgtaactatttgtaggtgtttctttatgattattgtaaaagggagaaaaatgagtattatgtatcagtatcaagcgacaaatactgggtatttatgcttatcgtttgtcacaatcgcggaatgtttattttagtgtggctggggtagagtgttttatgtagacatataaagcgggaggttatgaatcatggggaaaaaaattgcagttgttttaacagattattttgaggacagcgagtacactgagcctgcgaaagcttttaaagaagcgggacatgaactgactgtcatcgaaaatgaaaaaggaaaaacagtaaaaggcaagcagggaaaagcggaagtgacggttgacgcgtccattgacgacgtaaatccttcagactttgatgcgcttttgattcctggaggattttcaccagaccagcttcgcgctgacgatcgtttcgtccaatttacaaaagcgtttatgactgacaaaaaaccggtattcgccatttgccacggcccgcagcttttaatcaatgcgaaagcgctcgacggccgaaaagcgacgggctatacgtccattcgtgttgacatggaaaacgccggtgccgacgttgtggacaaggaagtggttgtttgccaggatcaattggtcactagccgcacaccggacgatataccggcatttaaccgcgagtcattggcattgcttgagaaataagaaaaaacggacgcccacgggcgtccgtttttttgttgcttaggcttgagcacctgtcagtttcttgtacctgtaatacaagaaagcagctgcagccgttccgatgaccgcaatgccgaagtcgaatatgaaaatatgagcgatgccccccgcttttgcgataagccctgttgcaatcggcagcagaatcgatgcaagacttgaagcggtcgctacaattccggtaacggttccttttcgcttccagaaaagctctgtcattaacgtaatggtaatttgaaacacacccgcagttgaaaagcctaagaaaaaggcagtgatgtccagcacaactgggatatgaacggtcagcatgactgcgagcgtacataaagtaataataggatataagagcgttatgaagacaggtttgacccatctattcagcaaaacggctaataataaaacagatgccagagatcctatactataatagctcagcaattgtacagatgctgattcagctaaaccggctgctttttgcgcgtagctcgggagccagatttgagaaaccgtaaataaagccgtggatgtaaaaccgatgataatcagtgcggtgccttctttctgaaaaacgggttcagacaagaaaacgggagattcctgttggccgctattagttggtttcttatgttttttaggaaacgaaagcgttgataaataaataatattcaggagatagaccgctgccggcagataaaaagcaaatccgtaaaacatgctgtggtctgctaaaaatgtgatcaaaagcggcaaaagtgcggccccgacagacataaaggccttgaccaagacattcgccgaaccggaagcagtcggaaagagctcagttagggccggatatgttccggcatccatcgctgaatttgcgactccggctaataaggcgaacacaaacgccagctcatagctcggtgataaaggaataccgactaaaaagacggccataattcccgcagaagcgacaacaagcggctttctgccgattttatctgatagaactccggaaatgccgtatgtcagcagtttgccaaacccgatagcggcaatgacataactgatgccggtcggatcggtattccactgttttgttaatgaagacatattggatgcgagaatgatgttgaccatccccagaaagaagtagttgatatacattccggatgctgttttgatagatgtcgtttgcatgcttgtactccttcaaatcttattcgaacactttgctgttttggtttggggaaatgataaaaaagactcgccgagtttccggccagtctccattatttacgaagcgaggctaattcttgagcaatcgcctgcatttcacttgggctgaatgattcttttttcatcaccatgctgtgaaggtacgtgaggtcttcaatcttctcatcactgaaatcctccgctttgattacgccgacgttcagcatgttcagcttttgggaaatctcttcaatcatttgagttaatgtttctgtatttgggctggacaaatggttccatcctttctatgcgcaatataggtatgttttattctaacagaattccatcagaaaaaaaccctattctaaaagcaggctgttcattccaaaaaagtgaagacatcagttgaaaagaaaatgaacatcctactaagatattcatgaaggtttctttttagagaaataggggcaaagaatagggaggttggacaacatgataagcgtgttatttgtttgtttaggaaacatttgccggtctccgatggcggaagcgatttttcgggacctggcagccaaaaaaggattagaggagaaaatcaaggcggactcagcgggaatcggcggctggcacatcggcaatccgccgcatgagggaacgcaggagatattgcgcagagaaggaatcagctttgatggcatgctggcgcgtcaagtcagcgaacaggatctggccgattttgattacatcattgcgatggatgcagaaaatatcggaagtctcagaagcatggcgggatttaaaaacacttcacatatcaaaaggcttttggactatgttgaagattcagatcttgccgacgttcccgatccttactacacagggaattttgaagaagtctgccaattaatcaaatcgggctgtgagcatctgcttgcgtctattcaaaaagaaaaacaattgtgagtgaaaggagaatttgcatgaacaacgaacgtttaatgctgaaagggatatttctcggagctgcggcaggtgcggcgttatcactgctccataagccgacaagacaggcgtgcggcatgagatggctgacatgcaagcataaactttcactgtacaaaagcaatccggagctgttaaaaaacactgtcatcacaaaagtggatgaggccaaaaaactcgcccaaacgctttcaaaggaagtcgactttgtgaaccagcaggtgaaagagctgaagaaaacaacgccgcaagtgatggaactcgtgcaagaaacgaaagagcatttttcaaaaaaatgatcaaacatgcgaggtgagacgacatgagttttttgaaagagcttttcagcagatacacccttcatgaaggacaaagtaaatcagcggagctggcgtatttttttctattgtcactgtttccgtttttgatttttatgctgacgctcaccgcgtatcttccgctttctaccgatgatgttttaggagtcatagaacaatatgctcccgccagtgcgatgtcactcgttgaatccattacccatcaaaccttaaataatcgaaatggcggtttgctgtcattcgggattatcgccgcattatggtctgcgtctaatggaatgaacgcgatcgtccggtcgctgaaccacgcgtatgatgtggaagaaaaccgctcttttatcattgttcgtctaacctcgatttttttgacgattgccatggtatttacgattttagtggctttgcttctgccggtatttggccgggagattggaaggctcgcttctgactttgtcggcgcgtcggatctgtttttatccgtctgggccgccattcgctggggtgtcagcccgcttgtgcttttgattgttttttccgcgctgtatgtgattgcgccgaacaaaaagctgtctctccggtttgtcatgccgggtgcggtctttgcgactatcggctggatcattgtcagcacattgttttcattttacgtcagcacgtttgcgaactatagcgccacttacgggagcatcgggggaatcatcgttctgatgatttggttttacttgagcggcattttaattatcctaggcggagaaatcaacgctcttttacataaacgtaaaaagcttcctgatgaaaatccctaccattagcgcaccctataaacgaacttcggttcaaaaagaagtcggggggatatcgtgatgaccaagcatacgaaaaaaggcggaagccataacaaacaaaattcgaaaagcaaatcgagcaataaaacaagcggaagcgccaacggacaaaacggctaccattagcataaaagcctcctgacatgatgtcgggaggctttttgattaagaagatgaagaataggtttcagccggtgaccagcttttcggtttgcccagcacaagggccagccacacagcgctaagcgtgagagtaatgaagtagaacaagtttgcgctttcaaatgtctgcatataccagccgccggcaaccgggccgaggatgctgccgagactgaatgtaatgccgcaaagcaggttccccgccggcaggaggtgaggcggaagaaggtctgtcatatagctgatgccaagtgtaaaggttgatccgactgccattcctgcaataaaaaagcagccgccgatcacgtaaggcgaaggaaatacaccggcgatgaaaaagcaaagagccccagtcagcaaaatcaccagcagcacattccgcctgccgtatctatcgctgaggatgccgagcggaaactgaaagataatgcttccaatcgcaaatgcgggaaggatgatcgctactgcgtctactgatatccccaaacggagcgcgtacaccggaaggcttccgttcagcgccgtttccagaaagccgtagccaaatgtaggcataaaggcaacccacccaaacagcatggcctgataaaatcgcctgaaactattgtctgatttggtttcatgaggactggtttccgggtatgcattttgtagaaagaaaacaaaaagccacgcaaacagactgatgcagccggacacgataaaaggaagcgacggactcagcttgacaagcggcaccatgaatgggcctgcggcaaagccaaggccaaaggaaagcccgtaaatagacagatttctcccgcgattttgttttgatgacatggaggtcacccacgtttgcgtagaaaagtgaagcatgtggtcgccgattccaatgaacaggcgaagcaggaaccagacccaaactgactgaagccaaataaatccgaataagcttaaaatgacaatgcttccgcccatgacgatcagcggcttgaacccgagctttctgagcggcgcttccataaacggcgaagccaaaagcacaccgatatacagcccggtcgcgtgcaggccgttgatagcagcggattctccatttgtttcaaaaatgattgaaatgacaggcagcagcatgccttgtgaaaacccggaaatggatacgagcaagacaaggataaagaaatgaaatcgtgacatcgtgtcagttctccttatatggaatctatgttgatcgtacaatgttttccaaaagcaggcaacctgaaaaaagcctatatcacgctatacatttgccctcgtgtaatcatgaaggtttttgtgaagaataaaaataaaacaagtcataaaaaaggagctatttcaccatgaatcgtatcttttttattttagtggcggccggtgttccgctttctgtgattggcagtttgatgcattggccttccgcggttctatttgcagtttattgcgtgacgattatcgcgcttgcaagctatatggggagggcgacagaatcactgtccatcattgcaggaccgcgtatcggcggtttgttgaatgccaccttcgggaatgcggtggagctgattatttccctttttgcattaaaggaaggcctgacaggaatcgtgcttgcctctttaaccggttcagtgctggggaacctgttgctggtagcgggcctatcgttttttgtcggcggtttaaaatataagcggcaggaatttaatatccatgatgcccgccataactccgggcttctgatttttgccatcattgtcgcctttgtgattccggaggtattctctgttggtatgggaaacgccagcaagctcaatttaagcatcggcatcagcatcattatgattctgttgtatgtggcggcgctgtactttaaacttgtcacgcatcggggcgtttatcagccgaataatgccgctcagactgaagaagaggaagagccggaatggtcagggaaggttgcgacgattgtcttgtttgcggcaacgattgtggttgcatacatatccgaaaacctggtccatacctttcactcggttgctgaacagttcgggtggagcgagctgtttatcggggtcatcatcgtggcgattgtaggaaatgcggcggagcacgcgtcagcgattattatggccttcaaaaataaaatggacattgcggttgaaattgcagtcggctctacgctgcagatcgctatgtttgtcgcaccggttctcgtcatctgttctatcttttttccgacaagcatgccgcttgtatttacattgcctgagctcgtcgcgatggtatcagcggttctcttgatgatcgcgatttcgaatgacggggattccaactggtttgaaggggcgacactgcttgctgcatatgtcattatggcgatcggctttttccttctttaacctgaaaaaatgatggataacaacaaagcgggatgaaaagactaagggaaaatgccatagaaagagtgatatgatgaaaaagctatttcattccacacttatcgtgttgttattctttagttttttcggcgttcagcccatccacgcgaaaaagcagtttaaggttcctaattctgtcgcaagcatttcaaaggaaaacacgtatccgaatgcttcacaggatcagccaatgcttcagccgagcaagctggcaaaggaattgctcgatcattctgaggtgaagattgaaaatccgcatctcatcaaaatgctgaatgaatccaacatatccggcacaccgcttgcagtagggtatcgggcgacaatatttctcgggaaatgggcgctcggctatgaatcaaatgaaacagtcgcaaactgggaatataaaaaaatcaatacaaaccgtgcggataaccgcggcgggaaagaaacggctgaaatgcattatgcccaggaacagcagtacagagtgaagggcggcctgacagctaaagttccaaatgctgaagatgtcaaaagcatgatgatgcaaaaagcaatgaagaaaacgaaccttccgcttgcatttgagacggtcattggggctggcacaaaacgggatcagatttataaagtcgctcctaaaaaaatcggttatttacatgcatatgcaccggctgtgaatgaaaaaggaaaagtgacttacggagaagtgtacttagtgctgaaaggaaataaacgaaaactcgtcgtgaaaaatgtcacgtcacagggcatcggtgcgtggattccggttcaagatcatgtcacatttggctttcagctttcctcactgccaagataaataaaaaactgattccaactcggaatcagtttttttgtttattgggttctctcgattcggaccgcttcctcaagcatttgcacattgttttggtagagctggcgaacgagaacccgtctgactgcaaggctggcactgaaataatcatcatctttcaccatgcctttaaccgtaaattcgacgccgcgattgattttattcaatgcggtgatgccgtggatttgaaacggttctgtcggattgccgaattcatcccgcttcaatgaatcacgaagctcttcattcagcatgtcacatgcctcttccaacacgctgtacacgcggtccggatcttctttaaagctgataagaaaggattcggtaatccgcataaaatcaatattatagttctctatttgtctgacctcgccgttgctgatggtgagcagcttcccgctccattcccggatttgcagcgagcggaggccgatttcctccactgtcccgttgaacaagttgttgacggtgacataatcgcctttgtgcagctggcgttcatatattaagaatacaccagccagcacatctttgatcagcgattgggcgccaaaaccgatcacgatacctgctacgcccgccccggccaatatcttgccgaaatcatgcacaaataaagaaataacgtaaaagataaaaccaattgttgccgtatactgggtgacagaacggacaaggctttcaatcgttttttcctttttttcttcaataaaatccgtccgtttaaaaaatagctgtaccagccggttgatgataaagacaccgatccaaaggataacggcaacgaggagaatatcgacgattttattttgaaaaatctccgtaagtgtttctttcatccgcatctaactcctggcttgacgttttgtgaagtctgtatcctgataataactgtttttgacaagaacattcggtccgaggcaccggacattcgggcagtggcaacttagttccttcgcaagcttggtctctctccacttttcataggcggaagggaggctgtccgtctgaatgttgccaagcggcggggtatcaccgaaatcggtcacgataatgtttccgtcgaaaatgttcacattcaggcgggatcggccgtcagggtcatttcgcactgtgacgtttttcgccgcgcgaagccggcgaagcagcttttggtcgtcttcgtccggactgcaggcataaaacggcagcgttccgaacagcatccacgtattttcatcacgaatatccagcaagcggtgaatggcctgtctcatctctttcaggctgagggattcaagagcgcttgcgaaatcgcttggatacattgggtggacctcgtgacgctgacatttcatatcttctgtgatttggcggtgaatatgctcaatatgcggaagagttcgtttgttcagcatcgtttccgcagataccattactccggcatccacgagcgtgcggctgttttcgatcattttttcaaaatagcgcgcgcgctgttcgaaggtcggttttctgtccatcatggcaaagccgatttcagcaaaatcttcaactgtaccccagttatgagaaatatgtagcacatcgagatacggaatgatccattcgtaccgctcgatgtcgagggtcagatttgaattaatttgtgtccgcacaccccgttcatgggcatatttcaataaaggaacaacatattcttttactgatttcagcgaaagcatcggctctccgcctgtgatgctgatggatctgaggcgcgggatttcctccagccgttttaacagaagatctattggcagagcattcgggtctttaggctgcaatgtatagcctacagcacaatgctcgcatctcatattgcacagtgtcgtcgttgtgaattcaacgtttgtcagctgcatgtctccgtattggtcaacatccatataggcttcccaagggtcaaactcgggcgtaatcggacgcagcttcgtgttttgtgtcatgactatctaactcctttataaatgggcatactaacgctgccaacagttaattttagacctgatttgccaagatcgcaagtagcgcggcgattgaaaaacggcaaaaaatgagctaccataataaaaaatgaatggaggaacagaatggggaacgccgtaaacaataaagatcagcagattgattatttaaagaacagacttgacatgtttatgaacgtcatcgattcattagaccctgaagcaaccgacgttgaagatatagacaggcttatcagcatgcttgatgacctggaagccaaatacgaacgttttaaaaaagattgggaataaaaccgcgtgcccgccgcggtttttttattggcataaagcaacagtataaaacaaagcccctatctgtaaaataagaaaaaatgcagaaggagcgctggccatgaagtggatgtgttcaatatgctgcgccgccgtattgcttgccggaggtgcagcacaggcggaagcggtgccgaatgagccgattaattggggctttaaacgaagtgtcaatcatcagccgccagatgccgggaagcagctgaacagtttgattgaaaaatatgacgcgttttatttagggaatacaaaggaaaaaacgatttacttaacgtttgataacggatatgaaaatggctatacgccaaaagtgcttgatgtcttaaaaaaacatcgcgtaacaggaacgttttttgtcaccgggcatttcgtaaaggaccagcctcagctgatcaaacgaatgtcagatgagggccatattatcggcaaccattcctttcaccatccggatttaacgacaaaaacagctgatcagattcaggatgaacttgattcagtcaacgaagaggtttataaaattacgggaaagcaggacaacctgtatttgcgtccgccgcgcggcgtgttcagtgagtacgtactgaaagaaacgaaacgcctcggctatcaaaccgttttctggtcggtcgcttttgttgattggaaaatcaacaaccaaaagggaaagaaatatgcctacgatcatatgatcaagcaggcgcacccgggagccatttacctgcttcacaccgtatcgagggacaatgcagaagcgctggatgacgcgattacagatctgaaaaaacagggctacacatttaaaagcattgatgatctgatgtttgagaaagaaatgaggctgccgtctttgtaaaagagaaagacctctccttaaacggagaggcttttctttattttatacatttaatcagtgcggcccagtccagatccccgaagcctttctcaatcccgttttcaaaatggcttttggccagctcggcaagaggaagatttgcagaaacccgttttgcggcggcgagtgccaggttggtatccttcagccctaaagacattttgaagccggccggctcaaatttctgctcggccataatggttccgtaattttgatagactggagaaccaaagagcgcgctggcgatttctaaaaattgtttttgttctaagccgtatttctccatcattaagaaggattcagataacgcctccagcatagacacgagtaagaaattgatgctgattttcgctgcatttgctatcttgctttcttcgccgacgtcaaatacctgctggctgaggctgtcgagcagaggcttggcggtttgcttcgcttccgccggtcctgctgttatgatgcgaagcgcggctttggctgcggcatccggtctgccaaggacgggagcggcgagaaaggattgtcctttctctgcatgagccgctgcgagcttttctgagaactcaacactgattgtgctcatcgagatgtgaatgccgttctctgctaatccttcaagcagcccgtcttctccgaatgtcacggtgctgacagaatcatcatctgcaagcattgtgatgacaatatcagcggactttgccgccagccgcggcgtatcagctgcctgtgcgccttctgtgacaaggtcttctgtcttttgtttcgtccggttatagacagtcaattcgtagcctgcttgaagaacatttcgggcaatgggctgtcccatattgccgagtccgatgacagcaattttcaatctgatcactccctgaatattttttccattataaacaatatgaacagaatatgcatagcgatcggcttataacaaaaaagaacagcttcccgctgccctcatttaaaaatattgaaccatcctttatgtacaaaccaaatcagcatcccgattacaagcgcagccatcaggccaagtacagcaaaatatccgtatttccaatgcagctccggcatgaagtcgaaattcataccgtatacaccggcaataaaggtgagcgggatgaaaatggttgatacgatcgtcagtgtcatcataatcgcattcatccggtttgagtttagcgtcacgtagctgtcacgcaagtcagacgtcatgtcacggttggattccacaatttcagataactttaacaaatgatcatatatgtcgctgaaataggctttcgtttcccgctgttctttcacatggtcaaggcttaaaatccggtagagcaaatcacgcatcggaataatcgtccgtctcaaatgcaataggtctgttctgagatcaaacacctcgttcatcagcgttccatacgttttgtggggacggctttcttcaatttcattcagccggtcttcaattttatacacgagaggaaaatattcatcaacaagctgatccatgatcatataagaaatatgcccgggcccttttttcaatatatccggtgaagcatacaaacgctcccggactttagcgataccgggcgtttcgtgtaaatgaaaggtgacgacaaatttttcgccttgaaagatatcgacttcctccgtctcaagtgtttccttattcagcgcatgaatcacgtaaaaacgatagccgtcataatggtcaagcttcggccgctgcatatgctggaagcaatcctcaatggcaagcgggtgaaaatgaaaaaaatctctcaataacgccgtttccgtatcctccgggccgtaaaaatcaacccagtaccatgcaatatcaggctgttccactcgttcgatcggtatatttttcagcagctgatgctctgttgtgattgcggtaatgttgatcataaacaaccctccacctgccattatatcatgcggtctttatgagaaaagtatacggtactctctgcctaattcaagcggcatgttatactgaacaaaaacggaaaaaagggtggatctcatgtggaaggaaaaagtatctgtcacgcctccgtatcattttgaccgcgtgctggacaggctgtctttagaccccctcaatgctgttgatcgagaggcgagggaagtccgtgtgccaatcagaaatcaagcgggggacgtatgtattgtaaaggtacaggcgttaggccatgcgggcgagcctgagttcctcgtcagcggggaaacggatcagggagaaatgatgaaggaaatcaagcggatttttcaatgggaaaatcatttgcagcacgttctggatcatttttcaaaaacgagcctgtccgccatttttgaagagcatgccgggacgccgcttgttctggactacagcgtgtacaactgcatgatgaaatgcattatccaccagcagctcaatctttccttcgcttacacgctaacagaacggtttgttcatgcgtttggcgagcagaaggatggcgtgtggtgctatccaaagccggaaacgattgcaaaactcgattatcaggatctgcgtgatctgcaattcagcatgagaaaagcggaatacaccattgatacatcaaggatgatcgcagaaggcacactcagcttgtcagagctgccgcatatggcggatgaagacattatgaagaaactgatcaaaattaggggtatcggcccgtggaccgtgcaaaacgtcctcatgttcggacttggccgtcccaatttattcccgcttgccgatatcggcctccagaatgccatcaaacgccactttcagctggacgataagccggcaaaggatgtcatgctggcgatgagcaaggagtgggagccttatttaagctatgcgtctttgtatttgtggaggagtatagaataattcgtctgacaatgaaggaaatcctgcaaacgtgttatactagaaagatgtgaaaaaaccatttcactttctgccatccgcagaaagcttcatatagaaacggagagaacaacgtgaaccaacaaaagaaacaggcgcccgtcgaactgaaggtcggacaaacctttccgctgacgattaagcgtctcggcattaacggagaaggtgtcggctattttaagaaaaaagtcgtcttcgtgcccggcgcgcttcctggcgaagaagttgttgtgcaggccacaaaggtccagccgaagttttcggagggccgcattaagaaaatccgcaaggcatctgagcaccgggtggcaccgccttgccctgtttatgaacaatgcggcggatgtcagcttcagcaccttgcatacagccagcagcttcgggaaaaacgcgatatcgtcattcagtctcttgaacgccatacgaagtttaaagttgaaaacatggaaatcaaagaaacgattggcatggacaacccgtggaattaccgcaataaaagccaattccagatcgggcgctcgcaaagcggcagcatcatcgccggcttatacggccttgattctcatgacatcgtgccgattaaagactgtatcgttcagcatccggcaacgaacaaaacaacaggcatcgtccgccgcattttagaggacttcaatgtgtctgtttataatgaaagaaaacgaaaaggtgacgttcgcacgatcgtgacgagagtcggctttgaaacaggcgaagtgcaggtcgtgcttgtaaccgcaaaagaaacgcttccgcacaaggaagaaatcgtcaaagcgattcaaaagcgattgccagaggtcaaatccattattcagaatgtaaacggggcgaaaacttcagtgattttcggtgagaaaacaaaaccgctcgccggaaaaacagtgattcaagaagtgctcggcgacgtatcttttgaattgagcgcccgcgctttcttccagctcaatccggaacagaccgtcaagctgtatgatgaagtgaaaaaagcggcgcagctgaccggaaaagaaaaagtcgttgatgcgtattgcggcgtcggcactatcggcatgtgggtggcggacggagcgaaggaagtccgcggcatggacgtcatcaaggaatcaattgacgatgctaagaaaaacgccaaaaaacacggcatggcaaatgccacatacgtaacaggaacagccgagcactggctcccgaaatggacgaaagaaggcttccgcccggacgtcgtcattgtagacccgccaagaacgggctgtgacagcacgttcctggacacgatcaaaaaagtcaaaccgaaacgctttgtctacgtttcctgcaatccatccacgcttgcgaaggatttgcagacgctgtcgaaggactatcgcgtggactatatccagcctgtcgatatgtttccgcagacggcgcatgtggaagctgtggcgagacttgtattgaaatcgtctcattaattcctaatcagatctggatttcggcagaatgaacattgccgatttccgggtctttttcgtgcatagcccttgtcctaactgtctgttctcaattttatcttccttctcattctcggagatctttattttaactggcgaaaagagttgaaaaaacgtgttgaaaagcgggtgaaaataagcgttatttaaccgggaaaatatcctcccagtatgattaaaatacatgagtaaaataatgtaaaatcatagatatattttcataatttgtaaaattatatattgacttgcagttattatgtgtgaaatattgattataggaatataaggaaaggtatggcgtatatcatttcaagagtcattcgatgtaaaaagttgaaacattgtaattaaatgaaagaggtgaaaatgatggccaaccccattttaaaatgaataatgtatgagcactacaacaattaaataatagtgccgacgataacaactattacagtaatacctacaatggttatatccttgcgacaatcatgcttcataataatttagattgacacttggctaaaaagtattgcagagaaggaaatggataactaaatggataaagtatataaaaaacgaccgttatataaaagaagttggtttcaaacatttttggcatttttagtatctcagctttattttaattttgtagaattaacgggagggggtcctaagtatagagaaatgaatggattcccagcaaacatagttgaactagatttctttcaaacatatctttcattctatgataatccatggtttaatattattactgttttcttgggagttttcactattatacaaataattacaggggtaacaaaggatattcgaaattaaagcaataacttctgatgccttatttaataatgaaagaaaatgtacactttcttaattatcttatgagtgaagactgcgacacttagtcagcagtctattttattggttctggatcaggcttaccgaattataaccctatacaaatatatagtaggttgccacttgctgcgttggttattttctaaatcatgagcaaatgccaaatgattcagattgaagttcttgaattcttttaaataaggatttattttctcttctcatcctctttactccatgtgattcataagtggtagcagcttaagtagagttttttttattctcttgagtactcagttataccacccccaactcaatttgcttaatcaaagtttatctcttgaaattagtttttccgcaaatatgatattgagatacggatatggtgtagcgttaaatatcttatcctcaataacaggacaattagtttgcgttggtaatatggagaactcatatgatattctatttaggttggaatcctttttatccaaaaagttcaaaagcaaggccactaagaaagacgaaggtcagcgccagtgttaaccacaatataaaaaatagggtagctaatcatcccacgtgaaatgttcaaaatttactatagattgataagaaatgctttcgcatgcgataagtgtaaaagaagcatggtcagttttttaatattgagatacaggtatagccgtatcccctaatgaaaggatttgatttttgttatgacagaaaatttctggcgtgaattaccacggccgttttttgtactggcaccaatggaagatgtgacagatgttgttttccggcatgtagtaagtgaagcaggcagaccggatgtgttttttacagagttcacaaactcagagagctattgccacccggatgggaaggatagcgtgcgcggccgtttgacttttacagaggatgaacagccaattgtggcccatatatggggagataagcctgaaaacttccgtaaaatgagtattggcatggcagagttaggatttaaaggactagatatcaatatgggctgccctgtgcctaatgtggcacagaacggtaagggaagcggtcttatccgccggccggaagttgcagcagagttaatacaagcagcaaaagcagggggattgcccgtaagcgtaaaaacaagacttggtttcacggatgtagacgaatggcgcgagtggctgacacacatactgaaacaggatattgccaatctttctattcatctgcgcacaagagcagaaatgagcaaagtagatgcgcattgggaactcatcccggagattaagaaacttcgtgacgaggtggcaccagatacattgttaacaataaacggggatatccctgaccgccaaactggcttaaaacttgctgaacaatacggtgttgatggaattatgattgggcgcggtatttttacaaatccatttgcctttgaaaaggagccgaaagagcatagcagcaaggaattgcttgatctcttaaggctgcatctggatcttcatgataagtattcagcattagaagcgcgtccgtacaagcctcttcctcgctttttcaaaatttaccttcgcgggttccgaggggcaagtgaattaagaaatcaatgcatgaacacaaagtcaacagatgaagtgcgtgcattgctcgatgactttgagagaaagtatcttgatggtttagagtaacagcagtgcttgattcaaaaaaggctaacaccattcttgactaaaataaacctggatgttcggtaaaataaacaattccgatttccgggtcttttttgtacgcagcttttactcagcctgtcttttctctaatttattgtaagaaaataatggtatatttagtggagataacttataaagggggagaggaaaatgaaacgactatgcatcatcccctgcggcaagaaaaaaatctgggacgtccagcctgatgccgggccggtaagagcagaggacgcttatctcagcccgtttcatcaggtgtgcgagcggtatgcgaaagcatttttcgatgagtgggtgattttgtctgcgaagcacgggttcctccgccctaatgatctcgtttcgggaaattacgatgtcacttttggcaccggtcatccggaaatcatgacagcggacgagctgagccgccaatttcacgaaaaaggcttttctgatatcgaagagctagtcatgcttggcggaaaaaaatatcgaagcgttctaaacgccgtcatcggagagcaccagcatatcagctggccgctatcatcatacaaaggcataggctacatgctccaagcgctgaaccgagctgttgaagaaaagcatgaactgtagcacgtatataagaagaaaagagtgtgaacatgaaaaaacttgtgtttggcttgcttgccattgcgttattcggatgcggactatatatctatcatgtatggttcggtgatccattttcgaaaaatgctgcagaacagaagctagtctcttatgtgaaacaaacctatcctaagaaagaaatcaagatcacgaatggggtatataacgctaaaacctctgaatatgtattcgaagcaacctcccaatctcatcgctacccaatgtgtacgaagggatttctgcatcctaaagtaacgtgcgatggaattgaagaagcgtataccgaatcagtatcaaaacatgtaaatgaagaagcaacgaaggcaatcgaagcagatctgaaaaaagcggttcctcgacttataaaagctgatgctgctttgagtatcgaaaacggacagttcacgttagatacaaaatggaacaaacagctggctgaaaaagcgcctatgagcatgacgattcagttagacgccagcgggttatcaaaaacagatgccgcaaagatggcggaaattgtcagaaaaacgcttaatgaaaagggatatacatactcaaacggcacgatagactgtatgcagaaggacggggacggcggtatcggatatgtcaaatattcaattgattttctttcaaaagcagctattcagtcaaacgatgcagaggaactaggaagttaaaaagatttccaaggaaataaatacgtcgatcattgtcaaaggccgggtgatatccggtctttttttttgcatgctgtaaaacgagacaaatgaatcagtttgagacaaaacgagacacacgtctcaaactgtctccaaagtgaagacgagaagactgattttacgggctcaaaagactggcacacttcttgcatttataatggtgaaccctaaatagaaggaggcgcacaaaatgaaattgttaaaacgagaaggcttgtcattaactgaggaaaaagcgctgtggatgtaccaaaagatgctggagatcaggggctttgaagacaaagtgcatgaactgttcgcccagggagtgcttcccggattcgttcatttatatgccggtgaggaagccgtggctgtaggggtgtgcgctcatttacatgatggcgacagcattacaagcacccacaggggacatggacattgtatcgccaaaggctgtgacctggacggcatgatggcggaaattttcggaaaagcgaccggattgtgcaaaggcaagggcggttctatgcacattgcggatcttgataaaggcatgttaggcgcaaatggaatcgtcgggggcggctttacgctcgcatgcggatcagcgctcacggctaaatataaacagactaaaaatgtaagcgtttgctttttcggggacggggcaaataaccaaggcaccttccacgaagggctgaatttagcggctgtatggaaccttcctgtcgtgtttgttgctgaaaacaacggctatggcgaagccaccccatttgagtacgcatcagcctgtgattcaatcgccgatcgggcggctgcttataacatgccgggggttacagttgacggcaaagatattttagcagtttaccaggcagccgaggaagcgatagaaagagcaagaaacggcggcggcccgtctttgattgaatgtatgacctacagaaactacggccatttcgaaggagatgcccaaacctataaaacgaaggatgaaagagttgagcaccttgaagaaaaagatgccattcaaggttttaaaaactaccttttaaaagaaacagatgctaataagctgtcagacattgaacagcgtgtcagcgaatcgattgaaaaagccgtctcgttcagcgaagacagcccatatccaaaagattcggagctgctgacagatgtgtacgtgtcatatgaaaaaggaggaatgtaagagatggcgagagtcataagcatgtcagacgcgatcaatgaagcaatgaagcttgcgatgagaagagatgaaaatgtgcttttgatcggtgaggatgttgccggcggagcggctgttgatcatttgcaggatgatgaagcatggggcggtgtattaggagtcacaaaggggctcgtacaggaattcgggcgcacaagagtgctggacacaccgatttctgaagcgggctacatgggtgcggctatggctgcggcatcaaccgggctgagaccgattgcagaattaatgtttaatgactttatcggcacatgctttgaccaggtgatcaaccaaggggcgaaattccgctatatgttcggcggtaaagcgcaagtgccgattaccgtccgcaccacatacggagcgggatttcgggccgctgcccagcattcacaagcgctgtatggccttttcacgagcatcccgggactgaagacggttgttccatccagcccgtatgatgccaaaggtctgctgcttgcagcaatagaagacgatgatccggtgttcttctttgaagacaagacgtcctacaacatgaagggcgaggtgccggaagattattatacaattcccctcggaaaagcggatatcaaacgcgaaggcaatgatgttacgctctttgcagtcggcaagcaggtcaatactgcgcttgaagcggctgcacagctttcagagaggggcatcgaagctgaggtgcttgatccccgcagtctgtctcctctggatgaggatgcgattttcacatcgttagaaaaaacaaaccggctgatcatcattgatgaagccaatccgcgatgcagcattgccacggatattgctgcgattgtcgctgacaagggctttgatttgcttgatgcgccgattaaacggattacagcgccgcatacaccggttccgttttcaccagtgcttgaagatcaatatttgccgacaccagataaaattgtcagcgtcacgcttgaattgcttggcgagccggcaatgaattaaaggggggacacaaatggcggtaaaagtagtgatgccaaaattgggaatggccatgaaacaaggggaagtatcgatatggaataaaaaagtaggcgacccggttgaaaagggagaaagcattgccagcattcaatcggagaaaattgaaatggagatcgaagcgcctgaaaaaggaacgctgatcgatatcaaagtgaaagagggagaagaggttccgcccggcacagctatctgctatatcggggacgccaatgagtcggtgcaggaagaggcgagtgcgcctgttgctgaagacaatatgccgcaagccgttcagcccgtcaaacaagaaaacaaacccgcagcctccaaaaaagatcgaatgaaaatatctccagtcgccagaaaaatagcagaaaaagcaggattagacctaaaacaactgaaaggaactggaccaggcggacgaatcgtgaaggatgacgtaacaaaggctcttgctgaacagaaaaaagatcaggcaaagcctggttcggaacagaaagcgcaggaaatcccggtgacaggcatgagaaaggtcatcgctgcccgaatgcaggaaagcctggcaaacagcgcgcagctgacgatcacgatgaaggctgatatcactaagcttgccactcttcaaaaacagctttcatcaactgcggaagagagatacggcacaaaactgacgatcactcattttgtctcaagagccgccgttctcgctctgcaagctcaccctgtgctgaacagcttttatcaaaatgagcgcatcatcacacatccccatgtacaccttggtatggctgtagccttggaaaacggcttagtggtgcctgtcatccgccatgctgaaaagctatcgctgattgaactggctcaatcaatctcagaaaatgccaaaaaagcacgcgagggacgtgcgggaagcgaagaactgcaaggctctaccttctccattacaaaccttggcgcgtttggagttgagcatttcacaccgatactaaatccgccggaaacaggcattctcggcatcggagcaagctatgacacgccggtgtatcaaggggaggagatcgtcagaagcacgatcctgccgctcagcctgacatttgatcacagagcgtgtgacggcgccccagccgctgcattcctgaaggcgattaaaacatatttggaagaacccgcagcattaattttataggaaaagcaggtgaaaacgacatgacattagccattatcggcggcggacctgcaggctatgcggctgcggtctccgcggcacagcagggcagaaacgtgctgctcattgacaaaggcaagcttggggggacctgcctgaatgaaggctgcatcccgacaaagtctttgttagaaagcgcaaacgttcttgataaaatcaagcatgccgacagctttgggatcgaacttccggcaggtgcgatatcagtcgattggagtaaaatgcaaagccgaaaacaacaggttgtcagtcagcttgtccaaggcgtacagtacctaatgaagaaaaatcaaatacaggttgtaaagggaacagcctcctttctttctgaaagaaagctcttaatcgaaggagaaaacggaaaagaaatcagagaggcggaccaagtattgattgcctccggatcagagccaatcgagctgcctttcgctccgtttgacggcgaatggatcatcgacagcaaagacgcgctttctctttccgagattccgtcttcactagtcattgtcggcggcggtgtcatcgggtgtgagtatgcagggctgttcgccagattgggatcgaaggtgaccatcattgaaacagcggaccagctgattccggctgaagatgaagatattgcccgtctctttcaggagaaacttgaggaagacggtgtcgaagtgcatacttcatccagattagagcgggtggatcaaacggccaaaacggcaatatggaaaagcggtcagcgagagtttaaaacgaaggccgattatgtgctggtggcgatcggcagaaaaccccgtcttgacggattacagctggaacaggccggagttgatttttctccaaagggcattccggtgaatgggcacatgcagacgaacgtgcctcatatttacgcgtgcggagatgctatagggggcattcagctggcgcatgccgctttccatgagggcatcatcgctgcttctcatgcttccggaagggatgtcaaaatcaatgagaaacatgtgccgcgctgcatctatacgtccccagaaatcgcgtgtatcggaatgacagaacgacaggcaagaagcatatacggggatgtgaagatcggcgaattttcattttccgcaaacggcaaggcgctcattaaacagcaagcggaaggaaaggtcaaaatcatggctgaaccggaattcggcgaaatcgtgggtgtctcgatgattggcccggatgtaaccgagctcatcggccaagcggcagcgatcatgaatggtgagatgacggcagatatggcggagcattttatcgccgcccatccgactttatcggaaacattgcatgaggcgctgttaagcacgatcggccttgcggtacatgcataataaaggaaaaagcaggcgcatggatataaggcgccggcttttttattgttgaaagcgctttatttttcccctacaatagatgaaaacggcgtgtaagggaggagcgatcaaggaaatgaattcggtcccaaacgatttgcaaacctggaaacgttttgtgaaagacggtgtgcttgacgaagcccgattaagaaaacggattgcagagtcatggcatcgctgcaaaaaagctgaggtcaatccttatttagaaaaaggcccgaaggttttacagcaaacggagctggatcagcagtcaaaaaaacattcattcttcttgacgaccgcaaagccttacctcgaaaaactgctgcctgccataaaagaaatggaaatgatggcgctgctaattgatgcagacggtgttgttctggcattggacggccatcccctcgcgctctatgaagccaaacgcatcaactttgttgaaggggcatgctggacggaaacggctgtcggaacaaatgcgattggcacggcgctccacatcagcgagccggttgcgatacaaggatcagagcattactccattgcttcccatctttggaactgttcagccgctccgattcaccatgaggatggcagccttgcgggtgtgattgacatatcgtgtccggcggcaggcgctcatcctcatatgctcggtattgccactgcgatcgcctatgcagctgaacgggaacttgcagctaaaagccgtgagaaagagctcgagctgatcagccgttttggagagagggctgcatccagtgtgccgatggtgctatgcaataacaagcagcacatcatcagtgcgagcataccgattcgaacctcaatgcctgattggcagggccggcacctgtatgagttgaaggaacggggctactcaatcgaaaaagctgtcaccataggagatggcggcacttgtttttatctttcggaacaaaagaaaaagaaggtgttccgattcaatggagtgatcgggaaaagcggccgatcgcaagcgatgctgatgaaccttgaacgtgcagctgcggcagatgcaacggtctgtttgtcgggcgaaactggtacgggaaaggaagtcgcggctcgcgctcttcatgagaacagtgagagacgtcacggtccgtttgttgctgtcaattgcggagcgattccgtctgatttgattgagagcgaactgttcggctatgcagagggcgcttttacgggagcgaaacgaaatggctataaaggcgcctttcaaaaagcaaatcaaggcacattatttttagatgaaatcggagaaatttcccactcgatgcaggttgcacttttacgggtgcttcaggaacgcaagataacgccaatcggcgggacgaaagaaattccggttgatatcagagttattgccgccacacattgtgatttacgcgagcttgccgaaaacggaaaaatcagagaggacttgttttaccgtcttcatgtctatccaattgaactgcctccattacgcgatcgcaccgaggatatcccggacctctttgagtactacaaacagaagaatcattggccaggcgaacttccttctgatttttgtcatgtgctgaagcaatggaagtggccggggaatatccgtgagctgtttaatgtgtttgaacgtctttctatcagatttccggacggccggctgagggatgaaccgcttcccgctttactggaagccgctggattgccggccagctctgcagaaaaaaagccggctgctgccggcgtgcttacctttcgtgagcaaatccaaaaggatatgatgatcaaagcgcttgaatctgcaaaaggaaacgtctctcaagctgccaaaatcagcgggattccccgaagcactttctacaaacgcctgaaaaaattcaacttgtccgctgaatcgtaaagcatacttccttcaggaaatggaaacgttatgtattgaaggagggtgttacgatgaatattcaaagggcgaaagaaatagtagaatctcccgatatgaaaaaagtaacatataacggcgttcctatatacattcagcacgtgaatgaagaaaacggaacagcaagaatttatccgcttgacgaaccgcagcaggagcatgaagtgcagctgaacagcttaaaagaggattaaacaaaaatggcccgcttcataagcaggccattttgttatccgcgcggcgcaaataaaataacacagacaccgatgagacaaatgaatgcgccgatccagtcatacagatcaggtgttttccggtcaacaagccatccccacaggaccgcaagcacgataaatactccgccataagcggcgtatacacggccgaaagatgggaaggactgaaacgtcggaagaatgccgtatacaatgaggatcagcgccccggcgattccatagccggctggctttgcctctctcagccatagccaaaccagatatccgccgccaatttcggcaagccctgccgcgagaaataaaagaatggtaatcagcatcatgagcactcctcaatttgcatttatctttcattatagaggaggagagcttttaaagcttcggatgattctcaaattccttcaaatacgcttttcgctgaacctctgtaaattggctgatccaattgttttgagcctcttcattcaaatggggaaggacatagcgttcaaccgcttcgaaaaacagcggattcgcgatgatgttccaggtcgggatgcgaacgattttcccgtctgttttctcgatgataatatcctcaaaaaagatccctttcagactgtattggtgacgtcccatataaagccgcttcacctcggaaaacagcacgctgcgctttctcgagaagatctcgccactaggtccggtctttatgctgaaaatgacatttccacggcttgtgaacgcaggaaaagccataaagaatgtgatcaatccataaattatcgccagtaatccgccgcccaaataaagcagggcatatttagattcaaacgtgagagcttcagccaccagccagactcccacaataaaggcgccccctgtagcgaggaacagccatattctaaaaaacagtctgcttttgaccttaatgacttcattgtttttcaattgctattctcctttatcgctctttagcaaaaagtattccttttatcacatctttatttgctgttacgatagaaaattcattttgggtaatacctgttaccagccaagtatgacggctgccaggcaggacgaaagccatgtcagctacttctggggagttgtctttgtcataaaccagccgcatcagcgtatccatttttccttttcgcaaagccagatcatttacaaaacgggtaacgtcctcttggtgatcatgcttatctagaaactccttgagatgtgtgggagtgtctgaagcgccctccaaaagcaattcaaattcagttgatgtcagagagagcattgattctttgtgatcttctgcatctattatatttaaaaactcggatgttttagagagtaatccattagttgaatccatttttttgattctatgcacctgttcatcaaacagcaattcatgagagtaagtgccaaactttgaaacatggcaggatatattctgttctttgccttgttcatcaaatttggacagcttcactgtatagtccgcgtcgtttaacacatggataaacggacagtattcgtcctttagccgatattgatgattccgatattccgcagcgtccttggctaagagtgagcggcacgcggcttcaaataaggcgccgagctgttcatcttctatttcgggaaaataggcttgttttaaggccattccctgttcgaaaaacccttcgctgtaaaaacaaaacaagagttcttctatgctgattgtaaactgcttcattgtttattctcctatccaaatgaaaatttccctttaaggaaatgggttgcgccgtgtatgagcgaatccgctgttttctttgctttttctattccttttttcgcactgtctatccctttatgtatcgttttattcgccgcatctatgccgtcattcactgatttgacgactttgccggctgattccagtccttttttggctgtatcaacgacagcatggatcggttctttaagttttatcgctgctttttcagcatagactgatgtgaattttgcgattttttccccaacaaaccctcctactgccgaaccaattgtgcctccgattactgtgcctacaggacctaacacacttcctacggcaccgcccacaacagcaccagctgtcgcaccgcccgcaataaaaatggtgttattcacagcatttccgacagccttggcgttttcacgcttgagaacttcgggtttattctggtattttgcataattttcagcaattttcacgcctgctccgaatgtttcggtcgcaccggtaatcagtgtggcggtaatggcatttcctttcgcgaatctcaagcccgtttttcccacatccttcaaagtggagcgtacgccggcttcattaagaaatccttttgtgtagcttctgacgctgtttgaaaaatccaccgtgtcctgagggaagtattttgtaaactttttatgtaccaaatctgaaaatggacggttggtcttttttaacaaatatttaggattcaaaagcactcttgccgctttttgataacgtgagctgtcaacggccctggaaatatccaagagcagttttgagtgctgggctgtatgcaagccgcttggctgtttcacaaatttcgtaagccctaatccgtaatattttccctgcgtcagcataagagcggttaagcttgtcatcgtaccgtatttgtcgtaggcattgtagagctttcgcaaaatatcatcttgttccacaaatttatcgcctgtttttctgatgaaaatctcattgtcactcagcttagtgacgagcgcctttcctgagctccacgcatcgcccactccagaaaaacagctgctgtagcggggatcgcattgcaaaatcatctgccccagctccacatgcaggtccttatatttgttttccatatcagttaattcagtgactacatcatttgcaagctgttcgagcttatccggatcaactgcaatgtttcctgacacaccgttcacctcccgagtttatgtctttcctctcttgctttacgctccagttcttccattctggcaatttcagcttttcgttcttctattttgacagcggcagccttcagctcttggcttgtttcaagcagctcctgttcgaattgatcgtaggcggctttcgtttcctcgaaatcctggtcaaacgaatctcttgatttgccctgccaagcatctcccaatgcagataaccgggattcaagcaacattttggagcttctgacctcttctgcggccgcactgtacttgtttgccagctcaatgactttatatgagtccaacttttgtcccctgccttttctaaattcacgcacaattggatgttttatataaatgattataaataattcggcatgtatccgaatcgtacaaaagaaccttttcataagaattggaagggcgtatattcacttaaaattcacagttggtgagactttaagattacaaaaaaggtaaaaaaaacaaatccctcagacataaggcaaatgagaaatttcccgctctatgggaaaaaacactaaagttgatcaaatgacctaagtgcgccaaacgtgttacgggacgggctatctcatggtataaatggaattgtaaacgttatcaaggaggtcgtcatatgaagaaaaaatcattctcaatcgtaatagcgggcggagggagcactttcactccagggatcgtactcatgctcttggaccatttggaggagtttccgatcagaaagctgaagctgtatgataatgataaggagagacaggatcgaattgcaggcgcctgtgacgtttttatcagagaaaaagcgccggatattgaatttgcagcgacgactgacccggaagaagcttttacagatgtcgattttgttatggcgcacatcagagtagggaaatacgcgatgcgtgcgcttgatgagcaaattccgttaaagtacggagttgtcggccaggagacgtgcgggccgggcgggatcgcatacggtatgcgttcgatcggcggtgtgcttgaaatattagattacatggaaaaatactcgcctgatgcgtggatgctcaattattccaatccggcggcaattgtggctgaagctacgagacgccttagaccgaattctaaaattctcaatatctgtgatatgccggttgggatcgaagaccggatggcgcaaattcttggcttatcctcaagaaaagaaatgaaggtccgctattacggattaaatcacttcggctggtggacatcaattcaggatcaagagggcaacgatttaatgccgaagctgaaggagcatgtatctcaatacggctatattccgaaaacagaggctgaagcggtggaggcgagctggaatgacacattcgccaaagcgcgtgacgtgcaggccgcagatcctgatacactgccgaatacgtatttgcaatattatttgttcccggatgatatggtgaaaaaatcaaatccgaatcatacgcgggcaaatgaagtgatggaagggcgcgaagcttttattttcagccaatgtgacatgattacacgtgagcagtccacagaaaacagcgaaatcaaaatcgatgaccacgcatcatatatcgttgatcttgcccgggcgattgcctacaacacaggtgaaagaatgctgttgatcgttgaaaataacggcgcaattgcgaactttgacccgactgcgatggtcgaggttccatgcattgtcggctcaaatgggcctgaaccgattaccgtcggcaccattccgcaattccaaaaagggcttatggagcagcaggtatccgttgagaagctaactgttgaagcgtgggcggagaaatcgttccaaaagctgtggcaggcgctaattttgtcaaaaacagtgccgaacgcgcgtgtggcaagactcattctcgaggatttaatggaggccaacaaagacttctggcctgagcttgatcaaagcccgacccgtatatcataactgaaattcccccattttcgaatctgtaattgtatataatagaaagaaaatggggggatctgatatgcagctcgaagaactgatcaatcagcactacagcaaattgaatgacaacgattttcatattttaaaatatatattgaatcataagcacacatgctatcaccttggaatcgacgcgctggccaaagcttgcagtgtatcgcgttcctcaattttacggcttgcccaaaagctcggtttcagtggctacagtgaatttcgcgtctttttaaagtgggaagatcagccggaagaaggcgagagtatgagttttgaaaagctgcttgatgatattgaagcaaatttgaagttcttacggacaaaggacatgacggacatgtgccagctgattgatgaagctgaccgcattttcgtctacggttctggaaatgcgcaaaagatatgcgcccgcgacctgcaaagaatgtttattccgcgccatcgctatcttattttaattgaagacacaaatgaatttaatttgatgcgcgatgattttaaagtaaacgatctgtttatcatcatttctctttccggagaaacaccggagctgattcctcaggcaagaatgctttctgcaaagggtattccctttatttccattacgaatttaaaaaacaatgtcctcgcccagctgactccgcataatctttatgcgacaagcaaacctgtgacattaagcgataaaacggaaattgtcgcttttgcaccgttttttctcgttggcgaagcattgttccgcgcatatgttgattacaaagaggcagaaaaaaatgacaatgagtagcagggggttctggtatgatgcaaaaaattcagcgctttggaagcgcgatgtttgtgcctgttttattattcgcgttcgccggcattatcgtcggtatcagcacgctctttaaaaataaaaccctcatgggcccgctcgccgatcccgacggtttttggtatcagtgctggtatattattgagcagggcggctggactgtttttaaccaaatgccgctcttattcgccatcggcatcccggttgctttggcgaagaaagctcaggcacgcgcttgtttggaagcgcttactgtttacctgacattcaactattttgtcagcgcaatattgacggtatggggaggagcatttggcgtcgacatgaatcaagaggtcggcggaacgagcggattaacgatgattgcgggcataaaaacgctcgataccaacattattggagccatctttatttcttcgattgtcgtctttttgcataaccgctattttgataaaaaactgcccgattttctcggcatctttcaaggctcaacatatatcgtgatgatttccttctttattatgattccgattgccttggctgtgtcttatatttggccgatggttcaatcgggaatcggctcgcttcaaagctttctggttgcttctggggcggtgggcgtttggatatacacgtttttagaacggattttaattccgaccggccttcatcactttatttacacgccgtttatttatggcccggctgtagcggaaggcgggatcgtcacgtattgggcacagcatctcggcgaatattcgcaaagcgccaaaccgctgaaggagctctttccgcaaggcggattcgcgcttcacggcaactcgaaaatcttcggtattccgggtatcgccctggctttttatgtgacagccaaaaaggaaaagaaaaaactcgtcgcagggctgctgattcctgtcacactgacagcgattgtcgccggtattacagagccgattgagtttacgttcttattcatttcacctttcttatttgcggttcacgccgtgcttgccgccacaatgtcgacagttatgtatatggccggcgtcgtcggaaatatgggaggcggactgattgaggcggtaaccttgaactggattccgctctttggcagccacggtatgacatatgtgtatcaaattttgatcgggctctcgtttacagcaatttattttttcgtcttcagatttttaatcctcaaattcaatatcgctacaccaggacgggaaaaggatgaacagcaggaaacaaagctatattcgaaaaaggaatacagagaacgaaaaaacaaggatgaaacggcctccgctgctgaaacggctgatgacaccgcttttctgtatattgaagcgctgggcggaaaagacaacatcactgaagtcacaaactgcgccacccgcctcagagtcagtgtcaaggacgaaacaaaggttgaacccgacagcgtattccgcgcgcttggcgcacacggcgttgtcaggaacgggaaggcgtttcaggtaattatcggattaagcgtaccgcagatgcgggagcgtgtggaaaaaatattgaatcaataaagactgccctccttttcgggagggttttcgtttgccgtcaaaaagaccgccatagtaaagtaaagaaagagacaatcgagtaaaaaggggtttggaggcttttacatgcaaaaggctttgtcgtttttaaaaccatattcattgctggcgggaattgcgctgattcttatgttgacggagcttgcagttgaactgctgcagcctttattgattgcgaaaatcatcgacgatgggatattgaagcaagatctgcggcatgtttggatatggggcgcggtcatgatcgggctgaccgtgttatcctttgcggcggggatgctgaattccttttatgccgcccatgtcagccaaagcttttcctatgatacgagaaaagggctttttcaaaaaatccagtccttctcctattccacatttggacagttttcgtcctcttcttatattacaagactgacaaacgacgtcacacaggttcaaaatatgatttttatgagtttgcggtttatgctgcgggcacccttaatgattgcaggcggcattgtgctgtcgcttgccgttaatgtgaaactcggcttttttctgcttgtgaccattccgatcctgatcttgtttttgctatgggtattaaggaaaggcggggcactgttccgctcagtgcagaaaaggctggatcaagtgaacaccatcatgcaggaaaatttaattgcaatcaagctgatcaaagcgctgcttcgcggcagccacgaagtcaaacgatttatcaaagccaacacaaggctgatggaaaaaacggtttcggcctttcagcttgtggaattcacgatgcctgtactgatgcttttgatgaatctctgcatccttttgattttgtgggcggggtcctacagtattacgagcggaagcactcaggttggcgatgttgttgcgataattaactacgcaacacgaattacaggcgcgctttcgatgtttccgtttttgattatgattttcacccgggcgaaggcttcaggggatagaatcggtgaggtgcttgaaacagaaggcgacgagcgggaggaaggcaccatatctgatcgtttgtcaggacggattgagtttcagcatgtatcctttcgctatcctgaaatggacagagaagcgctcaggaatgtctcattttccgcaaagccaagagaaacgatcgcgattctcggtgcgacgggctcgggcaagtccacgctttttcagctcattccgcggctttatcagccggattcaggccgcatttacatagatgaaaagccggttcaagatattccggctgaagggctgcgcaggcaaattggatatgtaccgcaggaagtcctcttgttttccggcacaatcaaagaaaacatcgcttggggcaaagaaaatgcttcactagatgaaataatggatgcggccaaacatgcgcaaattcatgaaacgattttgaagctcccaaatggatatgacacagttttggggcaaagaggcgtcaacctgtccggcggccagaaacagcgaatttccattgcgcgggcgctgattcgaaaaccggctatccttctattagatgacagcacaagcgcacttgatctgcaaacggaggcgaagctgcttgaagcaatcagcacataccattgcacaactttgatcattacacaaaaaataaccacggcgatgaaagctgatcagattttgctgctagaggacggcgaactgattgaaaaaggcactcacagtgagctgctttctgaatctcagttatacaagcgcatttacgagtcacaattcggaagggaggggagcgagtcatgctaaaagacatccgcaagcctttccaatatcccaaactgccaattgacaaaaaagaaggcgcgaaaaagcgggccaaagcaaaggatacaaagggcacactgagacgaatctggtcttacttggctgaaagaaaaggactgctcatacttgtcatgctaatggttgtcatcagcgccatattcggactccttggtccctttgtgatcggaaaggccatcgaccattttatcgtcgggaaaacggtcagcggcttgattcctgttttgcttcttctgcttgctatctatatcattcagtccctgtcgctttggtttcaaaactattggatgattacgatctcgcagggcacggttttcagaatgagaagcgaattgttcacccatctgcatgagctgccgattccattttttgataaacagcggcacggcgagctgatgagccgggtgacgaatgacatcgaaaatgtcagttctaccttaaatacgtcagtcattcaaattttgtcaagcgtgatcacctttgtcgggaccattgcagtgatgctgtacatgagcccgctccttacattgattacgctgaccattattccggtgatggcagcgagcctgaaatggatcaccaaccgaacgggaaagctgtttaaagaacagcagaaaaaccttggtgatctgaatgggtatattgaggaatctgtttcaggcgcaaaggtcatcaaagcatattcacgtgagaagcagattactgctgaatttctcgaaaaaaacgctgcactcaagacgtcgggcttttgggcgcagacgatttccgggtttatcccgaaggtcatgaactctttgaataacttaagctttacaatgatagcggcaatcggcggtttgtttgcgctgaaaggctggatctcgatcggctccatcgtcgtctttgccgagtattcaagacaatttacacgccctttaaacgatctggccaaccagtttaatacgatgctgtccgcaatcgccggcgctgaacgggtgtttgacgtgcttgatgaaaaagaagagcgcgaggatgaaaagaacgccgtgcatcagcccatccaaacaggcagcattgaattccgggatgtgtccttcggttacgataaagggcagcagacactgaagcatttacagtttaccgtgcctgccgggcagtccatcgcgtttgtcgggcctacgggggcgggaaagacaaccgtcactaaccttctcgcccgtttttacgagcctgacaaaggaaaaattttaatcgacggtacagatattaaaacccttactagagcaagcctgagaaaaaacatggggtttgttcttcaggattctttcttatttcagggaacgatcagagaaaacattcgctacggcaggcttgatgcttctgatcaggaagtcgaagccgctgcaaaaacagcgaatgcccatagttttattgaaaggctgccaaaagggtatgacaccgtgctgacgcaaaacggttcgggcatcagtcaaggacagaagcagttgatttctatagcgagggcggtgcttgctgatccggttcttctcattttggatgaagcgacaagcaacattgataccgttacagaagtcaacattcaagaagcgctcgcccgtttaatggaaggaagaacaagcgtcatcattgcccacaggctgaacaccattcaaagagcggaccagattgtggtgctaaaagacggtgaaatgattgaaaaaggcagccatgacgagctgattcggcaaaaaggattttacagtgacttatatgaaagccaatttgagaaatagacctttgtcctgcacagaggtcttttttgttacagttttatagtacttttatttcattttcgtaaaatgtaacaaaattacttgacgtaaacaagttatgtatatatactagcttacattaagtaagtgataacatttatcaaggaggataaaatgaataaatcatttgaaattggcacattacttttaagagttattacaggtattatcttttttgttcacggtttatcaaagtttcagggaatggagggcaccatccaatttttcggcagcataggccttccaagctttatggcgtatgtcatcgcagcgattgaactcattggcggagtgcttgtcttcttcggattggctacacgtattgtcggtgtactgttcgctcttacactgatcggcgccatcatcactgttaagctgaaagcgccattcatgggcaatgcagaatttgattaccttctgcttttgacatccattcacctggcgcttactggaagtcgattcctggcgctggacccatttgtgtttaaaggaaaaaagaacgaaaacgtttcagcataagaaaagaggcatgcagcatgaccagcattcatgaggatacacacattggctatgccaaactcacaattcgcagtctggagcgttcgcttcagttctactgtaacgtcatcggttttcaagtcttaaaaaagacggatcgccaagcggaattaacggctgacgggaaacgcgtactgcttattcttgaagaaaatccgagcgctgtcgtcttgcctgaacggtctgtgacaggcctttatcactttgcgattcttcttccggacaggaaagaacttgggatcgcgctcgcccgcctgattgaacacggcattgctatcggacatggagaccatgctgtcagcgaagcactctacctgtctgatcctgacggaaacggcattgaaatgtacgctgaccgcccccgcagcacgtggcagcgtgatcgggaaggaaactatgtcatgacgacaaccgctgttgacattgagggccttctggaagaggcaggagatgagcggaaaacatcgcttccgaacgatacaatcatcggacacattcatctgcatgtcagtgatttgaaagaagcaaaggcgttttatacagatgtactgggctttgacattgtcggaaactatgcgggcatgtccgccctcttcgtttcagccggggggtaccaccatcatatcggcttaaacatttgggcgggaagaaatgcgccgcctaaaccgacaaatgccagcggactagattattatactgttgtcctgccccaccaagaggagctggatttggtggcaaaccgagtcaaacacgccgggtattcgattgaagagacggaaaacagctttcgtgtgaaagaccctgtttccggcgcctatattacatttgtgatttaactgcaatccccttgccgaaaaaacggcagggggattttttattttccagaaactcctgtcaaaaatgccctgaggcaggtatgataagaagggaattgggtatcgggagtgatgagcgtgaaagctcttttttttacgagaatgttcaccttgatggtgagctgtttaatgtatctgtccattgtgaaagaggataactggtttggatatgtatttatagcagcaggtgctgccatgtatgcagccaatcatgttttgctgacaaaagagacaaatgccatctggttctgcctgattgatattgcaatcggcttttctttcggatttatctttcccggcacaggtttgttcattattatgctttgtccggttgcggtcgccttttttctgcggaggtttcctaaaagaacagcatggtctgtcttatgtctttcctctattttatttttgaccgtcctcatccgtacatatgcgatgttcggcaatgaatttgtcattgatcatttgactagcatgacattcgttgtcttctgcggtgtcgtgggcaaattaatccgcaagctgttggatgcgcaggatacggcaaaacagcagtttcaggaactgacggagtcccatctggcgctgtctgctgcacatcaggagctccatttatatgcgaagcaggttgaagagctgactgccatttacgagcggaacagaatggcgcgggaaatccatgatacagtggggcataaaatgacggcccttctcgtccagctgcagcttttgcgtgaatggcaaaaaagagacagccaaaaagcggatgagacagtaggtgtctgtgaaacacttgcccgtgaagcgcttgatgatgtccgcttatcagtacgcaccctgcaaactgaaaacgatccttcgctaatcgaatcgctgaaacagctgacagaggacttttgcaaaaatgcaggagtcacaacagaatttgcggtcagcggtgatcctgcaatcatcccgctgtctctccatccgaccctgatcagaacggcgcaggaagcactgaccaatgccaaacggcacggcggcgccgcagcttgttcgatacagcttgcctgcacaacggacagcatcagccttgtcattaaggatgacggcaaaggcaatcccgaggcagcacttggttttggtctcttgaatatgaaaaagcgggcagcggaacatggcggaatgatccgctttgaaagcgaacaggatcaaggatttactgtgaatgcagaattttcacttgccaataaaaaatggagcttcaggcccgtgcagcaaaaggagagtttattatgattaagatcatcattaccgacgatcaggatatcgtcagagaagggctggcatccctgctccagctcagagaagagctcgatgtgatcgcaacagcgcgaaacggacaggaagccttcgaaaaggcgaaagagctggagccggatatcgtattaatggacatccgcatgccggtttccaacggggtggagggaacaaaattaatcacaagctcattgcccggcgtaaaggttttgatgctgacaacctttaaggattcagcgctgattgctgaagcgcttgaagaaggagcaagcgggtacctgctgaaggatatgtcggcagatacgattgtaaaagcggtgatgactgttcattctggcggaatggtgcttccgccggaattgactgcccaaatgctgaatgaatggaagcgtgaaaaacagctgaaaggaataaaagagatagaaaaacctaacgagctgctcgacctgaccgagcgcgaaatcgaagttctggctgagctggggtacgggctcaataacaaagaaattgccgaaaagctttacattacagaaggcacagtcaaaaaccacgtttcaaatattatcagcaagctggctgtcagggacagaacccaagccgccatttactcggtcagatatggtatatctgtcttttgacatatgacgttttgcatatatgcttctctgaaaaggccttttacaggcctttttttcatgccctatgttctatctgccgctacatgccgcacgcctttctttcttctacaatggcaatggatcaaaaaaaggagtgagacgacgtgctgcaagcagaaaacatcaaaaaggcatatggaaaaaaaacaatcgtgaaaggtatttctttttccctccaaaagggggagtcgttcggtctgctcgggccaaacggtgcggggaagtccacaaccatttcgatgatttccggccttgtgccgcatgacagcgggaacatcacggtgggcggctatgtcatcggaaaagaaacggccaaagcgaaacaaaaaatcggcattgttccgcaggaaattgcattatatccgacgctgacggctcatgagaatcttatgttttgggggaaaatgtacggacttacgcacggcgaggccaaaaaaagatcggctgaggtccttgaatatgtcggtctgactgagcgggctaaagataagattgaaacgttctccggggggatgaaacgaagaatcaacatcggtgcggctttaatgcataagcccgagctgctgattatggatgaaccgactgtcggtattgaccctcaatcgagaaatcacattttagaaacggtcaaacagctcaacgaaacgggcatgacggtgatctatacgagtcattacatggaagaggttgagtttttatgcgatcggatcggaattattgatcagggggaaatgattgcgattggcacaaaaactgatttgtgcagccgccttggaggcgataccatcattcagctcacagtcagcgggatcgatgaagcgtttcttttggcgatccgttccctggctcatgtgaatgatgtaacagtccaggagtcagagctcaaaatcgacatttctgcggctcatcatgagaaagtcgtcaccagtctgcttgctgaagccgctgctcatcatataaacctgctgtctcttcaggtgcaggaaccgaatctggagcgcctgtttttgaatctgaccggccgcacgttgcgggattaggaggggcggcaatgaaaaaaagcatatggatcgcatggaaagatgtcaaaatcagaatcacggacagaaaagggtttatgatgcttatcctaatgccgctgatcctaacgtgtattttaggggcggcgctcggatcagttgttgacggaggcaaccggattgatgacatcaaagtcggctacattcaatcagaccagtcagatgcagcgaacatgtttacaaaagatgttctcaaaaaaatgaagtcgataaaggccacaaaagccggcagcgaagacaagatgaagaagctgattgatgaaaagaaaatcgatgtaggcatcgtcatcccgaaccattgggaagccggcaaaacctcagctgttgtttatgccgcacctgatcaaacattgaaaagttccatcatcgaaacagctgccagctcttttatagagcaatataaagcggtaaaggaagccgcgtcagcctcaatggactacatcagcaaaacggaagctgtacagcaaggaaaacttgaccctgcacagtttgcagaaaagctggcaaagacgctagaaaaagaaacaggtgacaagctgactattgcagaaaaatctgtcggcagcaaggccgttaccagctttcaatactattcggcggcaatgctttgcatgtttatgctgtttcatatgacagtcggggcgaaatcgtttttacaggaaaaggatacggagacgcttgccagaatgctgatgacgcctgcgcaaaaatccgtcattctcttcggaaaatggcttgggacgtatctgtttgctatcatacaatttttcatatttctgatcgtcacaatcaatgtatttggtgtggactggggcggtaatctgctgtttgtgagtgtactcgggctttcttacgccgcagctgtatctggtatttcaatgctgcttgcgtcgtgcatcagcgatatgaaatctgcagactcgataggcggcttcggcattcaattgcttgcggttctcggcgggtccatgctgccgctgtaccaatttccggacgtcttgcagtctgtatccaaagcggtgccaaatcgctgggcgcttgacggctttctttctttaatggaagggggaggctgggctgaccttcaaaagcctgtgcttctttttgcggcgatcggcttttgttcacttgtaattggtatcagacggcttcatacaagataaggaggtacaaaaggtgaaaaaaattctagccatttgcggcattgagctttctctcatttttaagaagccacagaactatttgatcatgtttgctgccccgcttttgcttacctttgtatttgggagtatgctcggcggcaatgatgataaggtgcggcttgcaatcgttgatcaggacgatacgattctctcacagcattatattcggcagctgaaggcacacgatgatatgtatacattcgaaaacgtgtctgaaaacaaagcgtcagaaaagctgaaacaaaagaaaattgccgggatcatcgttatttcccgctcgttccagacacagctggaaaaaggcaaaaaccctgaactgattttccgtcacggccctgaactgtcggaagcgtcgatggtcaaacaatatgcagaaagcacattggcaacgctcaatattcaggtgaccgcggcaaaaacggcatctcagacagcgggagagaactggaaggcggcgtataaaaccgttttcgccaaaaaacatgaagatacagttccggctgtaaaacggcagacgctcagtgataaaaaagagggcgcggaagcaagtgacacagcctccagagcagcaggtttttccatcctgtttgtcatgctgaccatgatgggagcggctggaaccattttagaagcaagaaaaaacggcgtctggtccagattgcttacagcctctgtcagccgagtggaaatcggtgctgggtatgtgctgtccttctttgtcattggctggattcaatttggcatattgcttctttccacccattggctgtttgccatcaactgggggaatccggctgcagttattgtattagtgtcactttttctattgaccgttgtcggcattggattgatgattgcggccaacgtcagaacgccagaacagcagcttgcgttcggcaacttgtttgtcatcgcaacatgtatggtgagcgggatgtattggccgatcgacattgaaccgaaatttatgcaatccatcgctgaatttcttccgcaaaagtgggcgatgagcgggctgacggagattatcgctaacggtgcccgcgtcacagatattctcggaatctgcggcattttgcttgcatttgctgcgatcactttcgcagcggggctgaaagcgctccgagcctaaaaaacatctgccgtttaggcagatgttttttagcatgtgggtacattcgtatgggtgtagcctgaactgcggttaatccttatctatcatagctaaaattgattccagccaagaaacgtaatttttctcccgctccagcgctttcgttagcacaagatagtggccgaagtccggtgaagaaaatgacatcggctctgctgaagccataagcttttcatagcttccctgtaagtcagaaagcttggcctgtcgtttttgcagctggtctttgaacaaatcagaagcctcctggcgcgatagacaagaaatgaaataagccttcagcataaattcatccttcaccgtctcgggtatcggctggtggcggatcagccagtcatgcagttcctgctttccgctgtctgtcagggtgtacatctttttctccagctttgtgccctgaatcgttgtccgaaacgtgataaatccttcatccgtcagctttttgagctcagggtaaatctggctgtgcttggcgctccaaaactggccgagctcctctttaaaataactcgtaatatcgtatccactcaattcgccttttcgcaaaagccctaatatggcgtattttaatactctcatgctatcctccgtgtctggctgtttcgcaaaacagatgagccggtgctcaactgtgattctaactgcctattccccttattatagaaaagggaggaagggaacacaaccgggctctttggaaatgaagataaaaggtttgtcagaaggtatccgatttatctccgtcaatataaaagagatttaaatttaattttcagaaaaaatagtaaccatattgattttttatgtataataggaaattggtggtatgaacatgttaagggggaataaacgtgaaaaaagtacttatggcattcattatttgtttatcgctgattctatctgttttagccgctccgccgtctggcgcaaaagctgaatcagtacataatcctgtcgttcttgttcatggaataagtggtgcatcatacaactttttcgctattaaaaactacttaatttctcaaggctggcaaagcaacaaactatacgcaattgatttttatgataaaacaggaaataacctaaataacggcccgcagcttgcttcatatgttgaccgtgttttaaaagagacgggggcaaaaaaagtagatattgtggctcatagtatgggaggcgccaatacgctgtactatattaaatatttaggcgggggcaataagattcaaaatgtcgtaacgcttggaggggctaatggtttagtatcatcaaccgcgctgccgggtacagatcctgatcaaaagatcctctatacatctatttacagtctcaatgatcaaattgtcatcaatagcttgtctcggttacaaggagcgcgaaacatccagctttatggcatcggtcatattggcttgctctctaatagccaagtgaacggctatatcaaagaagggctgaatggcggaggcctcaatacaaattaatatcttcaaaaaacaacctgctgtctccgttacagtgggttttttcgtctgagaaagccatagggtcttatgaccttagtctatcatgcatacgtcaatttatgacatcaggcactttttcaaatagagcggacatgttaaggtacaaccatcgatttctatcaatttgaaataaaaggagcgctgttatgcaaattaaagaaatttttatgatccgctgcatttcgtgcttaagtgtcgtcttgctccatatcatttcaatggtcctgatgcttcaggcagaagctcttgcagatatttctcacactgttgattctttccgcacactcctgatgttcagcacgcccgcttttattttcatctctgaatttttactggcccgttcttatcctgatggggtgcctgacggttttttaaagaagcggggaaaagtgatttttgttccttttttatttatcgcggccatcgatgcgctgctgatgaccagtgcgatggggggagaggtaacctttctcgcgtttgtgcaaaaatatctggcgaacgttttcttaggaaactttatcggatacttcattctcgtcatctttcaattttacatgctgcatatgatgtttcatgagtacttgaaaaaagcatcgccgaaatgggtgctgtctatctcatttgtggtgacagccgcttatttaggctatttctccgcagccagcccggctcctgcttctgaagagggaggggcatttccgttcttctgggttccgttcgcaggctggcttttctacttttgtctagcctactattgcggaaaagaatacaagcgttttttagcgctgctgaaccaataccgctgggtggtgtacggcggcgcaattgcttccggggcgctggttgtcactgtttcttatgtgggtgaaatcggcatgatcagctcgaagcggcctgatatcatgctgtattcaacaagcatgattttcctgtgttttcacttgttttccaaaatgaagcatgtgccgaaaatcatgatgtttatcagcaactattccttttcgatttatctgcttcatgcctattttatgattataggctacgtgttgcttttgaatatgcccgacattcctgccgtaccggctgttctcctgttgtttgccgtgtgcacagccggcccgattatgacttcatgggcgctgaataagttcaaatatgggtatttatttgtggggaaaatttatcagccaaaacagaagaaggtaacagtcgaagtgcgtgatcacgcagggtgaaaaacaagcggcaggggggatcctgccgcttgttgtgtattaaaacatacagtatacacaatctttttcttgtaaaataaaggagaagagtgaatagaagggagaacattcatgacatcagtcaatctaagctacccaataggagaatacaaggcgagggaatccgtatcgaaggagcaaaaagataaatggattcaagtacttgaagaagtgccggcaaaattgaagcaagctgtagagggcatgacggacagccagcttgacacaccgtaccgggacggtggatggaccgttcggcaagttgttcatcatctggctgacagtcatatgaacagctatattcgttttaaattgagcttgacggaagagacaccggctattcgtccgtatgatgaaaaagcatggtcggagctaaaagactcgaaaacggcagatccgagcggctcactcgcgcttttgcaggagcttcacggaagatggacggctctgctccgcactctgacggatcagcaatttaagcgcggattttatcaccctgatacaaaggagatcattaccctggagaacgcgctcggcctgtatgtctggcactcacatcatcatatcgctcatattacggagctttccagacggatggggtggtcttaacgcttttgccggcggaaagccggaatactgatagcagcaatcaccagaagtgagatcacagcagccgctgcatataactgatcatagccgctggcgacactcgcatgaatggcgtcgcttatcgcggttttgacttcaggaacgggaatgcgttcgatttgttcttgtaaagaagaaacatcagaactgtcgatctccggaatcatctgcatcgccttttctgaatatccgctgtccgataagcggctgttgatctcatcacctatttggtcaaacccggctgtgataaaacctgcataaagagtaggcgccaaggtcagtccaatttgccttactaatgaaagcgtgccaagagctgtacccttatttgtttttgccgcttctgatacaaggacgttcagcggagcgcctaacagaaagccaaaaccgatcccagctgccacacttgcgatcataaactcccatttttccgtcacccagaacggaaataaagcaaaccccgcacatgagatgattcccgaaagaataacggtttttacaggacctttttggtcggtaagcgctccgccaagccaagcgccgattccggaagccaacgcaagcggtgtcatccaatagcctgcttttgcggcagggacacccaaatactgttcgacatatgacgggataaaaatgactgccgccaagagccccccggataacaaaccgatgataagcgtgcgctgaaacatatggtttcgcagcagagaatacgccaaaatgggatcgcctcctcgcatttcaactctcttttcatacgagataagcgctgcaaaacagagtatgccaaaaataatacatccataaacctccggattccccaagctgtgtaagagatttgccccgtcaagattggtcatgccgtacatcacagctaaaatcgacagggacaaaaggaagattccggccgcatcgaggcgcttagcctcaggtgcttttgtttccgcgataaaacatgcgccgaaaacaaccaatagcacggcaatcggcaaattaatcaaaaacagccaatgccaagacccggtccaatcaagcagaaagcttccgatatttggcccgagcacagcggccatcccgttcattgcgccaagcagcccaagcgccttcccttgtttttcctttgggagggtcgcgagaatgtgagagctgccgatgatgaaaatcccgccgcctccaagcgcctgaatcagccgcgatatcagaaagagcgggaagctttggctcaaagcaacaagcaaagaaccaagtccgaacaggcaaacctcaatgagaaagagtttttttctgccgtagcggtcggaaagctttccgacgattggcacactgacgctaagaccgagcgtataaagggtaatgccccatgatccccaggaaggggaaacggaaaacgactcgtttatcgttgttaaggcagctgaaataattccgttatctagcgcagccataaatacaccaatcgtaaacaggctgatcgcccacttttggcctttctgctctgttaatgcttcagacatattcatcaacctcctttttattcactcaaagtatattattcattttaaatgaactaaatgtcaaataaaaaaagcctgctcccgcagtttgcggatgacagacttacagatttattcttttttcgctttctctaatgctcttgaaaggatagacagcccttcggaaaccgcctgcttttcttcaggggacagcagctctaatgaacgcttcaatttcaggtggcctttttcatacaaaccccggaaaatatttttcgcattttctgtcaactgaacaactacagagcggcggtcctcttcagaatgtgagcgtttgacaaaccctgatttctcaaggcggtcaagcagcccagttgtattggacagggaagcccccattttttcagcaatgtcgctcactttcaatgttccatggttgtttaatagcatcagcactttcatttgcggcatgctcatatccagcttcatccactcggacacatcaccgaggccggcggaagttaagactttcatatagagcacccatatttcccgttcctccgatgaaagaatgttttcgtttaatactgttgtatcgtgtaaattatattccatttcatcacttcctcatcattcactcctcttaccatattactcgattttcactcctgaaagaaagtgagcagaaaccgcatgcgggactttgtccgaaaaataacggtagtgtataatgagttggagattattgggggagaggatcgaactagaatatgattggagagaccattgctgattaaaaagaatgctttatcaatattaaaaatcgtttttcctattgctgttttgctatttgttatttatcaatcgaaaaaagaactgacaaatctgtcattcaaacgtacgctcatggtcatcaacggactggaacgaactgacttatttatgcttgtgttgatcggcttgctggctgttgcggccatgtcgctgtatgattacgtcctgaaatactcacttcgcctatcgatcacaaacggaaaagtattcagggtttcctggatcgccaattcatttaataatgtgctgggcttcggcggtttagccggcgtcgggttaagaatgatgttatataaggagcatacgaaagaccataaggcactcgtgaaaggaatcgcctggctcacatcatctatgctgctcggattatctgttttcagcattttcgtcgctgcgagaatgctgccagtggatgaagtgattcatgaaaagccttggctatgggcggtcgttatcggttttgcgctgatattgccgctgtctttggcggtgtccaaaataaaagaccgcaaagctggggacgaagagaatgcggacaaagtgaaaaatccgattttcgcatatattggagcttcagttgttgaatggctcatggccgggatcgtcatctattttgctttgttcgctatgggcattcatgcagatatcaggtatgtgttcggggtgttcgtcattgcggcgatcggaggaatgatcagcctcgtgccgggcggcttcggctcgtttgaccttttatttttgctgggaatggagcagcttggctatcatcaagaggccatcgttacttctattgtgttgtacaggctcgcctactcatttatcccatttatcttgggactgttctttgccgcaggcgacctgacggaaaatacaatgaagcggctcgaaacgaacccgcgcattgcaccggcaattgagacgacaaacgttctgcttgttgttcagcgtgcggtattagtgagaattttgcaaggctcgctttcccttattgtgttcgtagcaggtctgattgtcctggcctcagtttccttgccgattgaccggctgacggttataccgcacattccgcgcccggcgcttttgctgttcaacggcctgtccttaagctcagcgctcattctgctgattctgccgatcgagctttataaacggacaaaacgttcctatacgatggccattacagcgcttgtcggcggctttgtgttcagctttttaaaagggcttaacatcagcgcgatattcgtattgccgatgattatcgtattgcttgtgctattgaaaaaacaatttgtccgcgaacaggcatcctatacactgggacaattaatattcgctgtggcgctgtttactgtggcgctctttaactacaatctgatcgcgggctttatttgggaccggatgaagaaggtgctgcgtcacgaatatttcgtccacagcacctcgcatattacacatgcaaccatcatggcgatcattattgtgccgctgttcttcttgatatttacagtggtctatcataagagaacgaaaccgatcggagagaaagctgatcctgagcgtcttgctgcgtttctcaatgaaaaaggcggcaacgcgctgagccatctcggttttcttggagataagcggttttatttttccagcgatgggaatgcactgcttctgtttgggaaaatcgccagaaggctggtcgtgctcggcgatccgtctggccaaagagaatcattcccgctcgtgctggaagaatttctgaacgaagcgcatcagaagggattcagtgttttgttctatcaaattgaacgagaggacatggcgctgtatcacgattttggctacaacttctttaaattgggcgaggaagcatatgtagatttaaatacatttaccttgactgggaagaaaaaagccggccttcgggcaatcaataaccgctttgagcgggaggagtatactttccatgtggatcatcccccattttctgatgcgtttttggaggagctgaagcaaatctcagacgaatggctcggctcgaaaaaagagaagggattctcgctcggattttttgatccttcctatttacagaaagcgccgatcgcctatatgaaaaatgcagaaggagagatcgttgcattcgcaaatgtcatgccgatgtaccaggaaggagagatatcggttgatctgatgcgctatcgcggcgacgctccaaatggcattatggacgcattgttcatccgcatgtttttatgggcaaaggaagagggctgcacgtcttttaatatgggaatggcacccttggccaatgttggcactgcctttacatccttctggtccgaaaggtttgccgctgtcatttttaataatgtcagatacatgtacagcttcagcggcctaagagcctttaaagaaaaatacaaaccggagtggcgagggaaatacttggcgtatcggaaaaacagatctctttctgtcaccatgttcctcgttacacgtctgattggcaaaagcaaaaaagactccgtctaataagacggagtcttttttttatttcgtttttaagaagtaggtttcaatatcatcaagcagatagtttgcggctttaattccgcctgcggttgtccacacgacgtcatcgacttcatgtgcattacctgacttcacggcctttaggtttttccatagtgaactgcttgtccactgattggcccatttttcattttcctttgcattatcggctttataagtgaaataaaacagcacatcagcatccatatcaggaatagattctttactgtcggttgagaacgtaaattggtccttttgtttcttaaacagctccacttgtttttcagggcgtttgaagccaagctggtctaaaataatcccaggaaatgaatcggtataatagattcttgactcaccggataaaaagcgtacgacagaaacggttttgtttgtctggtcgcccagcttgttttttaaatcagaaacgcgtttatcaaaatcggcaatgacttccttgcttttgtccgccttattcaccgcgttggcgtatagagtcaggttatccttccagttcccggccaaagattcagcaaaaacagtcggcgcaatcgcatttaactgatcataaattttctcctggcgcactttgtttccaataatcaaatcaggctttaattctgcgatggcttccacattcggttccgtttcaagaccgacgtttttaacacctttcatgtcatctttcagatagtcataccacgggtcgcccttccatgactttacggctccgaccggcttaatgccaagcgctaagagcgcctctgttccttcattagttaaaacaacaatccgttttggattggcggggatgttgtctgatgtccccattgcatgtttgaccgttcttgttttgctgcttgacccctcgctgttgcttgaactttctgaactattacaggcagaaagtaccataaaggccattaaaaatacgaatagcatgctgatatgctttttcatctttttcctcccaatattgaaattcattatcatttagatcataataagcagtgttaagagtgtcaatccctaattgaggattattctcaaaaacaaacattacatagtaaataactaggagaatattagatcatgatctgcaaaaaggcatcttcaaaatggattgtgttagtatgtctgattttcattttactggcggctgtctgcgcaagcgtcgtgtatggctatacaggtacgtcatggagacaggtctatcaggcgtttacttccttcaacggaacaaatgagcatgtcatcatcaaggatgtcaggcttccgcgcgctttggttgcgacagtcgtcggcgcctcgcttgcagccgcgggcgctctcatgcaggcgctcacaaaaaatccgcttgcgtcaccggggattttcgggattaacgccggtgcaggtttttttattgttgccggatcgttttttctgcatattcagtcacctcaggcgctagtatggagctcgtttcttggggcagcatttaccgctgcgatcgtctatgcagcaggctcgcttggaagagaaggactgacgccaatcaaactgacgctggcgggagctgccatggcagccatgttttcttctctgacacaaggcttgctttctgtcaacgaactcgagcttgcccaggtgcttttttggctgactggctctgtgcagggccggagtctggatctgttgatgacgatgtttccatatgcagcggcagcgctggtaatctgcttctttctcggccaaaaaattaacctcctcgttatgggagaagatgtggcaaaaggactcggccaaaaaacgggcctgctgaaatttgtgatggcgctttgtgttgtcatgcttgcagggtccgctgtcgccattgccgggccgatttcttttatcggcatcattattccgcattttgcccgctttgtcgttggtaatgattatcgctgggttctgccattttccgctgttttgggtgccattttgcttgtttgcgcggatatcggtgcgcgatatatcattatgcctcaggaagttcctgtcggggtcatgaccgccatcatcggaatgcctgtgtttgtgtacatcgcaagaagggggcgaagctatgaaacttcgttttggcgttactgcggctgaaaagaaagcatggatcgtctttttgattttactgggttaacagctgcggtactcatcataagcgctggtctcggacaaaggtttattcctccctgggatgtagcaaaaacattctttggtgcaggttccaagctggatgaactgatgatcatgtcgttccgcatgccaagaattttgacggctttatgcgccggtgtctgcttggcagcggcaggcgcgatattgcaggggctcgtcagaaaccctctcgcatctccggatattatcggaataacaggaggagcggcggtagcggtcgtgcttttaatgatgttcttctcagaccgcagcagttcacttacgatcagtctgtcatggcttccagcagccgcatttatcggcgcatcggctgtcgggctcatcgtctatttactggcatacaaaaatggcgcctccacatttcggctggtgcttatcggaatcggattttcaatgtcggcgcaggcgatgactaccctgttgatgatcaaaggcccgatttaccgagcatcacaagccaatgtgtatatcactgggtcagtttatgggtcaaactggcagcatgtaaaaatagctattatcttatctgtcattctcttattcatttgttttgtcgcgctaaaaaatatgaatatacaggtgctgggtgaagatattgcggcgggtgcaggaagcgctgtgcagcgaaatcgttttttcttgctacttttgagtacggctcttactggttgtgcagtttcagttgccggcacaatcggttttgtcgggctgatggcgccccatattgcaagacggcttgtcggctcatcttatggcgcgctgctcccagcgtcggcacttattggagctctgctcgttttaacagctgatatcgtcggcagaaccttatttgctccggtggaagtgccggccggcgtctttacagcggctatcggcgcaccttattttatttatttgctctataaaacaagaaattcttaatcgttacacccattttcttaaaaaagaaaatgggtttttttgataatgactgaagattcgtaattatttttgctatactgacagagacattgataaagaaagggcggcagatgaatgaaagaagcagaggtattaaaatatgaagcatttacaagcagtcccggcaaaggaaaccccgcaggcgtcgttttgcagggagacgattatacggaagacgagatgcagatcatagctgagcgtgccgggtattcagaaacctcctttatccgaaaaagcgagtcggccgatcttgaactccgttactttacacctggacacgaaatgaatttgtgcggtcatgcgacagttgcttctctttacgcattatgtgagaaaagaatgctggagagcggtaaaacgtacagcatccaaacgaaagcgggtatcctgcctgtgaagatttctgaaaaagatggccgtattcatatcacgcttgaacaggcctctccgcaattcaaaccatttacaggcgatcggggaaaacttgcgaccgcactgggtatcaccgatgaagattttcatgaagaccttccgattgtgtttggcagcactggcatatggacagccatcgttccgcttaaatcattggaggcttccaaaaaaatggtgccagataacaaacaatttccggaagtgttaattgatctgccaaaagcttcagtccatccgtttacctttgaaaccgttcatcccgacagcgacctgcacggacgccacttttcatccccgtattcgggaacgattgaagaccccgtgaccggcacagcatccggcgtgatgggggcttatatgaaacattatggaaatgccgagcagcataaatttatcattgaacaagggcaggaaattggaaaagacggaaaagtggagatcgaaatgaacgaagccggcggccatgtgaaagtgaacatgacaggaacagccgtttactcagaaacccgtattcttaaattctaatacggatgatggtttacaaaaagatgcactttccgttattattatgaaatgataatcattttcaattgcataggaaggtgagacggtatgcctcaaaccgaacaaatacatcagcattcagtactgcgggacatcatacgcagcagaagatcgattcgaaagtttaaacaagagccagtaccttcagcagtcattcttgacatgcttgaaacggcaaaatatgcgccaaatcacagagtgacagagccatggagatttatttacgtttccagtgagacaggtaaagcgaacctcatcaatacatttgcagcgttctctaagaaatccaagccggatatgacagaggaaaagcttcaaaatttcaaaaacacacttgggcgcgttccgggatttctgctcgtcgtgtttcaggaagatgaaaacgaaagagcgcgggacgacgattttgcggcaacaagctcgttgattcaaaatctccagcttcttgcttgggaaaaaggaatcggcatggtttggaaaagcggaaaaatcctttatgacaaagaagtccatcaggcctttggtttgcaggataatgagcgtttcgccgccatcatacaaacaggttatcctgacgaggcgccggaagtgaaaaaacgcacaccgatccgcgaccggtttactgaaatgtaaaaagccccttgtctcaaacggagacaagggtttttcattaacgagatttctttttcgctctgttgtcggctgctttcgcacgctcttgcgcttcgcgatcatctgcatcagcaagctcggttgaatattcttcgtaaacgccgtcagtttccctttttaatgtatcgggaacttgtggaagcttttgtttgtttttatcacggtttttgtggatatgatttctgcccatatcaaattccccctaaaaagtgatatcaaacaaatatagtatttggttttaaggggttatgtattcctacttccgcttagcagctttttccgcttttttaaattcgcctgaataaagaacttcctgcatttttttcaggttggcgccttgctggtgcttctccctctttttttccataaaaaggacctccttcaaccatgttattcttaaggttgacgcttcctgctgtttttatacagtctttcggtccgctatcagctgtgagagtgcaaattcaagatccgaatatgtaaaacgaaatccagaggttatcgcttttttaggaagagcgcgctgtcctttcacaatcaaaagactcatttcacccaatgcttttgataaaaagaattccgggacggggagccaatgcgggcggtgcttcacccgtgcaatcgcttttccgaattgcttcatgtccacaggattgggcgcggtgacattcattgggcctgagatgccggcattttccaccgcatatcggatcatctgggccgcatcctcgacatgaatccatgacagccactgccttcccgttccaatcgttccgccggccagaaacttataggggagaaccataagcggtagagcacctttttctccaagcatcacgccaaatcttgcataaaccgtccggatgcccatcgcttcaatatgctgtccttccttttcccacaggtgtgcagtatggctgagaaaatcctcatctgacgttgcagaatcctctgtgaaagttttctcaaggcttgtcccgtaaatacccacggcactggcttggatcaatgtcttcggcttctccttctgtttctgaataagccgctgcacttcacgcgtcgcattgatacggctggagagaatgtgctgcttcgttttttctgtccagcggccaaaaatcgattttcccgcaaggtttatccagacatcaatatgaggaagttcctgctccggggcggctccttccgtcagccattggacatatgtcatatttttttgttcagtttcccttgcgtttcttgataaaatataaacatggtgtccctggcggataagaacgcctgtcagatgctggccgagaaaaccggttccgcccgtcattgcgatattcatgaacatctctcctcatcgttctaataaatatactttacctcattgtaataaaagaaaacgcgtttcaggcctgagaagggagattaagatgccgtttattacaaaaatatcaacgcaaaaaaagaatacggaacgcttcaatatttttctggatgataaatacgccttcagcgtggacgcggatgtgctcgtgaaatttgagctcaagaagggaaaagaactcgatgatcttgacatcattgagattcaatacggcgatgaagtgaagaaaggcttcaaccgtgcgcttgactttttatcctatcgaatgcggtcgacgaaagaggtcgaggaccacttaaagaaaaaagaaacctcgccccccgtcattgcggaagtcatccataggcttaacgattacaagtacttaaacgaccaggaatttgcctcagcctatgtcagcactcacaaaaaaacaaacggaaaaggccctgatgttttgttcagagagctaagagcgaagggaattgatgccgatacaattaaggaggcgctaagttccttttcctttgaagatcagacaagagaagcggtcaagcatgttgaaaagcttctcaaaaaagataaaaagctttcgacgaaagaattcaaacagcgcgcccagctgcagcttcagcgcaagggcttctcatttgatgttatcagcgcggcgatggatcagattgaatatgaaaatgatgaagacacagagaaagaagcgctgcgccttcacgcggaaaaagcgtttagaaaataccgctatgacggctcatatgaaagcgccatgaaggtcaaacaatttttattccgcaaaggattctcactcgatttaatcgagcaattactgcaggaagaggagtactgaaatggagaaacgatacagtcaaatgacacctcacgaactcaataccgaaatcgcattactttctgaaaaagcaagaaaagccgaacagcatggaatcataaacgaactggcagtgctcgaacggaaaattacgatggcaaaagcatatttgctgaacccggaagattactcaccgggagaaacatatcgtgtggaaaacactgaggacgagtttaccatcagttatttaaatggcgttttcgcatggggatacagaacctcttcccctcagcaagaggaagcgctgccaatctcagtattgcaagaaaaagaataaagcgtaacaggaggctgattatcagcctctttttgtttgcagcacatttacacgaattcttaaagaaaaaatcattgaattcacttgaaaaatcttttaagatgaaactcgttgttttttaaaatcaaaggaggcgatgacgttgagtatcaaaaacccatctgtaaaatttattatatttgttcttatgatttgtacattttcaatcggctatacagaatacgcggtgatgggtattttgacgtcgattgccaatgactttcatatacaggtttcatccgcagggcttcttgtcacggcttatgcggctagcgtttgtttgacaggaccgctcgtcaccatcatttccgtcaagcttccgagaaagcctgtgcttcttgggctgatggcggtttttatcctttccaacctgatgagcgcactggcgccgaattttgcggtattggccatttcaagaattttatctgcgtccattcacggcgctttcttcgcgattgccatggtattcgcaagtgaaatggttccgccggaaaagcgtgctgcagctgctgcttcaatgaacggcggactgacagtggctctaatgcttggtgttccattcggctcttatctcggagatgtcctgaattggagagcggtgttttccatcattacggctcttggtgtcatcggatttttaggccttatggctgccgtgccgaacagaaaaccaaaagtgatcccaatgcttatgaatgagtggggggtttttaaacacaaacaagtgctgttttccttcgcgattaccattttaggctattccggtgtctttatcgcctacacctttatcgaacccattttgaggcattcagccggattcagcacggttggcattacaggtgctctctttgcgtatggattgggaggcgttgccgggaatttctttgctggaaaggtaccgctgcctttgctgactcggacgatgatcggcgtaatgatcggtttaatcggtgttctggctgtatttccttacatcgccatttacccggctgcagccattgtggcaacgttcctattcggggcatgcgcattcggcacgccgcctcttctgcaaacaaaggtcatttcctcatctgagggcggcacaaccattgccgcagctgtcagcgtatcagcatttaaccttgccaatgcccttggtgcatggatcggcggaatgattttaaacggaacaggctcttattcctggctgtttgcaggaggtgcgcttatgaccgcatgcggacttgtgctttctaccttcgcacacttatcagaaaagaagagcgtctacgaatatcaagtcaataaagggtaaaaaacagctgcagtgtatgcagctgttcttctttaccgtttgcctgaggctctcattctttcttgaggatgctgattgatagatccgtcagcacgctttgaagcatagtcgtcctttgctctcggttcaccctgaaatttgttttcgttttcgtaaggaaatcctttttctttatttcggaccatgtcatatccccctaggttcgagatcaaaaagttgcgtcttttcagatgaagacgtaaggttagtatatggagaacaccacgtaataaagcgttatttttttcctgaagaaaggagactgcacacatgaatatgtacattgagaaactgactaatctgcttctggaaaagaacgagatgatcagctatatacaggcaaaaacgtgggtggaattgttatggagcgatttcgaagcaacctacgcaaaagccggacacgcctatcaaggtgaaaaaatgactgaaaaaatcgtcacacaatggattgaaaactatggcggccagctccacctttttcaaagctcccgtaacgacgtgaatgattacttaaatcaaagcagaggccttttgcattaaaaacctgccgttaacgaccggcaggttttttcattttcttaaaattaccttaacaggaagaaatcataaacaaaacatgtttcaccagcctgtcaatcagggaataccacttatatcttgtcaaaatgcgaggaggagctttatatgaaaaagaaacaagtaatgctcgctttaacagctgccgcaggactgggtttgacagcacttcattccgctcccgcagcaaaagctgcgccccttcacgacatatctgtcagcatgccatcatccgatacttacatcataaaagcaggaaaactgaatgtccggactgagccaaatcatgaaggtgatattctcggcactgtatcatcagaacaaaaggtaaaagtcgataggttcgtaaatgccgattgggctcaaattcatttcaaaggaaagaaagcatatatttcaactcactttttaatgaaaaccgcaagccaagcgaaaacaacgaaacagacagccttctatgcaccgacgcccgaaaatggaaaagctaaacagctctcatctggaacagaggtgacaatacttgggtggggattcagtgaaaacggcggatttgacttcacttgggggttcgtggattatggcggagttaaaggctatattcacacaaaggatttacaaatgcgataaaaaggcaggccgaggcttgtctttttgcctatgcatgaaacatttcttctttctgcacgtaacaatgagaaaggagatgatgatatgacgggtttagtcggcggagggcttatgatcattgcgggcatactgatcaaactgtttcctcccaaatcgatcaacagtgtgtacggatacagaacgagacgctcaatgtcagatcaaagattatggaatgaagcgaaccgttacagtgcatcattaatgatcctgtcaggcttggtgattgcgggaatgggtttgctgctgggatcaaacttgtttattcttcagcttatcctgctgattgccgccagtgtcataacatttatgctaacggagaaaaggctgaaaatcatgacgcacagtcaaggaggagatagaagtggacggagttaaatgccagtttgtcaatacgaacggaatcacgctccacgttgcagccgcaggaccggaagacggcccgttaattgtcctgctccatggatttcctgagttttggtacggctggaaaaatcaaatcaaaccgcttgttgatgcgggttaccgggtcattgctcctgatcagcggggctacaatctcagtgacaaaccggaaggaattgattcgtatcggattgatacattaagagatgatatcatcgggcttattacgcaattcactgatgaaaaagcaattgtcatcgggcatgactggggaggggctgttgcatggcatttggcttccacacgcccggaatatcttgaaaaactgatcgcgatcaatattccgcacccgcacgtcatgaaaaccgtaacgccgctttatccgccgcaatggctgaaaagctcgtatatcgcatacttccagctccccgatataccggaggcatcactaaaggaaaatgattatgaaacattagacaaagcgattggattatccgaccgtcccgcgctttttacatccgaggatgtcagcaggtacaaagaagcgtggaaacagccgggcgcactgacagctatgctgaactggtacagagccctcagaaaaggaagcttggcagagaaaccctcttacgaaacagtaccttaccgaatgatctggggaatggaagaccgctttttgagcaggaagcttgcgaaagagacggaaaggcattgcccgaatggacatctcatctttgttgatgaagcttcccattggattaaccacgaaaagccagccatcgtcaatcagctgattttggaatatcttaagaaccaataagctaaaatttctctccatccgtctgtcataatggcagactttttctgtgcgtttttttcatagtctgttttaaacatgacaaaataacattaaaaatcatgaatgtcaccataaaattgtaacaaaaaacaggtttaaacgactttaaaaaaaggaatagccttactgaagatttgtgtaaaactcccctaaggcaatacttaaaaagaataataaaaagaaggtgccttaatgaagcaaggattaatctcgattattatcccgtcttacaatgaagggtataatgtcaaactcattcatgaatctttaaaaaaggaatttaaaaacatttattatgactatgaaatattcttcataaacgacggaagtgttgatgacacgcttcagcagatcaaagacttggcagcgacgtgcagccgggtaaaatatatatctttttctcgaaactttggaaaagaagccgcaattttggcgggctttgagcatgttcagggcgaggcggttattgtaatggatgccgatctgcagcatccgacatatttgctgaaggaatttatcaaaggctacgaagaagggtatgaccaagtcattgcccaaaggaacagaaaaggggacagctttgtccgctcactcttatcatctatgtattacaagttcattaataaagcggtggaagtcgatttgcgtgacggtgtcggtgacttcagattgttaagccgccaagctgtgaatgcacttttgaagctgagcgaaggaaaccgcttttcaaaaggccttttttgctggattggctttgatcagaaaattgtattttatgaaaatgtcgaacgaaaaaacggcacctccaaatggtcgttcagcagtctgtttaactacggaatggacggcgtcgtttcatttaatcataagccgctgagattatgtttttatacaggcattttcatcctgctgctttccatcatttatatcattgccacattcgttaaaattctgactaacggtatttctgtgcctgggtatttcaccattatctcagcagtgttatttctcggcggagtacagctgttaagccttggaattataggtgaatatatcggccgaatctattatgaaacaaaaaaacgcccgcattatttgatcaaagaggcgaatatcccgaacaaagacctgcctgaaacgaacgaattaaaaagcatgcggcgtctgacaaaaatgcactgaaaataccaagcgccattggcagtgctttttttgcgtgtctattatcttaaaagcaagactggagaatttatatgaaaagaaaacatatcatgatctatgcggccagtttgctggtgtccgttctggcacacgctttttttgtgaaagaatgggcggaaggcaggtatatgacaggtccgggtgacgggcttgcgcaaatgatcgtatttaaaaaattattatttgaccaatatacacacgggaattttttctacaattattcattcggacttggcggcggcacattcagtcagctcggctattatttttccgcgtcttttctttttcttgctgtgtccgccgctgtttggctgcttcaagccgtccagctgatcggagaagcggatacgcttttttgggcagagtcagctgttttcatcagtatttttaaattgagcttgatcatctttacgtccgcttctgtttttcattatcttcttaagcacagggcggcatcgttcacgggagccgtgttatacggcgtctcaattatttatttccgtcacgaagcgtattgggaatttttcaccgatacaatggtttggcttccgctgcttgtgcttggtgcagaaaaaattattagagagcggcgtccggcgtggtttatcgttgcgtgttcgctgacgttaatcaacaatttttactttgcatacataaaccttatattcatcggaatctatgtgctgttcagatggctgatccgtttggaaccacatgaagagaaaagatggattcaaatcagattatttctcgtttcaggcttcatttcttttggcatcagtgcggcggcgtttgtgccggtagtatacggttttttaaacaacctgcgccctccatacagccagaaaatagagtggctcaatttcgatgataatatcttattttcgagccggatcatcattgtgccggccgcttttctgctgtttttgtttattatttctttttacaaaaaccgtgtgtttcgtctctttgccgggttgagcctgctgtttattctgtttcatttcagtccgtatgcggcaagcgtctttaacggtttttccgccccgcaaaaccggtttgaatatgttctggcctttaccattgcgggagcagctgcggctggtttgtcacagctgtctgaattgaaacggaaagaactgctcccggccgcagctgtcgtcctgcttctttacttgtatcatattcaaaggtataagctcgatatatggaagcctgcgaatgaaagtattctattgctcttactcatgacaatcgcagccttgtttgctgcagcttttgcgaaaaaacgggcaaaaatggctgtgtacggtataatcattctttcttcgctgtttgtcgccaactcctatcaaaaatacgcgctctcagaaggcggcgatttggatagtgtgacaaaagaatatcttacaagtgaggaatacagagggcgggaatcatctgagctcatcagacgtttacagaaggaagacgatgatccgctcatgagaatcgactggatgaacggggtccgcaataatacgccaatcatttacggatttaatggcttcagcgcgtattccagcattttaaacaaagatctgctggccttctattggaatgatttaagcatcgatatgggcagggaaagcgtcagccgttacgcgtcattgggagacagggcgaatttatacagcctgctttacggcaaatattatatgaccgaaaaaacaaacgaagccagcgtcccgtacggattcaaaaagcatttagaaacagagcattatgcagtttatgagaatcagtacatgcttccattcgtcaaaacagcggatgccatatacagcgaaagtgagctggaccgattgcccgctcttgcgaaagaacaggcgatgctgaaaggaattatattaaaagatccatcaggaaaaacggagcagacaccaaaaccgtccaatttgatcaccaagtcggacatcaccgcaaaacaagcccagtatcaaaacgggctgctaaccgtaactggagaaaacggaggagagctgatcatcaccccgaaacagccatcatccgctgcgggagactactatgtcagcttttatttgaaaagcaaagcaaaagacaaaggatttacgttaaaggtaaatgattatgtcacaacaaggaaatcgaacaaatcgatctataaaaccggagtaaataatataacggtaagagtgcctaaatcaggccatatctcaatcaatcttccgaaaggaacctatgagctgagaaacatagcgctctatgaagaaaattaccaaacgctgaaaaacgctgtaatgcaaaataaaacagagaaagcagacaaactgaattggaacaaaaatcgactgacctttgcctatcatctgtcaaaagaccagtacatcatgcttccgatcccatatgaaaaaggctgggagctgaagatcaacggaaaaacacagaagatcgaaaaagcggattatgcttttataggcttcaaggcgcaaaagggagacaatcacattgagctgacttactatccgccatacttcaaaatatcggcggtcatatctctcgtcagtctgctgtttgctgttttctatataagacgtaaaaagcccggctctatatagagccgagctttaattttttctgaagtttttcttcgctgaatatccatcccgtataggacgaacgaatcgtgagatcatggccgatgtgaacaattgcgacaaacggataatggcctttgctccgataacgcaggtcgataaatctcacctcataatgatctttaaacgtatccacttcccaccggtataccggagaaaaggacagaaacgccgcaatgttatcatcctgctttgccgcatgcattacatcggtttcaggaacaggcacccgattaaatgtatccagaatcacgacatgtccttccatgcttcttcctacatagaaagcatgtgctgtcgtcactgcgattcgccattgcctgaatttcatcgttggagaaataataatgctttcgatctcatcatgaatcatctcatgaagcttccgtttaattctcagctgcatgatcaggcgcaccaagtagtagcctaccaatatgatatataagctgagaaacgtgatgccgggactcccgcctgcataccaaatcgcgatagctgctagatggctgataaaaataaacggatcaaacgtattaatcagcccgagcgcaacccattttttcgaaaatggacgaatggcttgtgttccataggcgttgaatatatcaacaaagacatgcagaacgactgccagcagtgtccacagccacaggtgcagaaaatcggcctgaggataaaataaatacagaatcgccgggatgatgacagaccaaaacaaaacggcgggaattgaatgggtaaatcctctgtgattccttatataaacagcattgtttttaagctttaacacagtatcaatatccggagcctgagagcccgcaagcgttgcgatcataacagcgtgagccattgccggatctgatccgacaacaggatcaagcgtcgcaataccgcccagtgcgatgcccataacgacatgtgtgcccgtatccataggtgacctccttgcaggatgatcctgcacattcactttgtaagaaattccccattttcatatacccaatttttaaactgattcaatcgttctcatatgtttccgctttttctttattactatttaatgtaacatattatcgtactgtgcccttagtgtacaacaaaaaacagtctaaagaaaagcggggcgcgaaagactggggagaaacacatatgaacgtacttgaagacaaattaaaacaaaaagacatacagcaatttcgcgatgatttaatctcatggtttgaacgagagcagcgcgttctgccgtggagagaggaccaagatccatataaggtgtgggtatctgaagtgatgctgcagcaaacgagagtagagacagtgattccttactttctccggtttgtggaacaattcccgacagtggaagcgctcgctgatgctgatgaagaaaaggtgctgaaagcatgggaagggctcggctattattcgcgagtcagaaacctgcaaagcgcggtaaaagaagtgaaacaggaatacggcggcattgtccctccagacgagaaagattttggcgggttaaaaggcgtcggcccttatacaaagggagcggtgctcagcattgcctacaataaacccattcccgcggttgatggaaatgtgatgcgtgtcatgtccagaattctttctatttgggatgatattgccaaaccaaaaacaagaacgatctttgaagacgccatacgagcttttatttccaaagaaaaaccatctgaatttaatcagggcttgatggagcttggagccttgatctgtacgccaaaatcaccctcatgcctgctatgcccggttcagcagcattgctcagcatttgaagaaggcactgaacgggagcttccggtaaaaagcaaaaagaaaaagcccgggatcaaaaccatggccgcgatcgtactgactgatgaagacggacaagtgtatatccacaaacggccgtctaaaggtttgctcgccaacctgtgggaattcccgaatcttgaaacacaaaaagggatcaaaactgagcgtgaacagctcattgctttcttagaaaacgaatatggcatacaagctgatatcagtgatctgcaaggtgtagtcgagcatgttttcacccacctggtatggaatatttcagtgtttttcggtaaagtaaaacaagtgtcggataccagcgagctgaaaaaagtatcgaaagaagagctcgaacaatttgctttcccggtgtcacatcaaaaaatctggaagatggcagtagaagcagccgccatctcggctgctccgtaaaccattcttaatcgtaagagacgcgcgtgccgtggctgtagtccgcttcattgcgcttcattccgccgcgcgcttcaatttcttgcgttaattcccggtattttgattggccttcttcgttcaaataaggcataatttgctgaaaggcatgatgaaaataagcgagttcactgttcttccaatcttttttggaaaccatgttcaattcgctcatatcacgtccgacatacataacagaagaccccctttaaagttcttgccattattgtttgtggaaataaaagaactatacgctacaaggagatgaggaaaaatggaacaaaataaatgtgcactcgtaacaggaagcagccgcggtgtcggaaaagcggccgcgatcagacttgctgagaacggctataacatcgtcattaactatgcacgcagcaaaaaagcagcattagaaacagcggaagaaatcgaaaagcttggcgttaaagtgcttgtcgtaaaagcaaacgtaggacagcctgcaaaaatcaaagaaatgtttcagcaaattgatgaaacgttcggcagacttgatgtttttgtcaataatgccgcttcaggagtactaagacctgtcatggaattagaagaaacacactgggactggacgatgaacattaatgcgaaagcattgcttttctgcgctcaggaagctgccaagctaatggagaagaacggtggcgggcatattgtcagcattagttcattaggctctatccgctatcttgaaaactacaccacggtcggtgtatcaaaagcagcgttagaggctttaacccgttatcttgccgttgagctttcaccaaaacaaattatcgtcaatgctgtttcaggcggagcgatcgacacagatgcgctgaagcacttcccgaatagagaagatctgcttgaggatgcgcgccaaaacacgccggcgggacgcatggtcgaaattaaagacatggttgatactgtggagtttctagtgtcttccaaggctgacatgatccgcggacagacaattatcgttgacggcggacgctcactgctcgtttaaaaatttttaaaaaagaggaatagctatacgatcacctgcacattctaatgaccgtggaggtgataacaatggctaactcaaataacttcagcaaaacaaacgctcaacaagttagaaaacaaaaccaacaatcagctgctggtcaaggtcaatttggcactgaatttgctagcgaaacaaacgctcagcaagtcagaaaacaaaaccagcaatcagctggacaacaaggtcaattcggcactgaattcgctagtgaaactgacgcacagcaggtaagacagcaaaaccaatctgctgaacaaaacaaacaacaaaacagctaatcactgaaacagaaaaaagcacttcatcttcgggtggaagtgcttttttctgtttgaaaaacgacaaaacttgtggaaggtctacagaatgagtcaaagggtttgctttatggagatcgaaatgattaaaggaggaaatgtttatactttcatcaggctgaaggaggaaccgatgaccgaatttgaaaagctggtaagtgaacagatgaaaacgatggataagcttctcgatctccaatcagagctcgaccgctgcaaacaaattgaggcggaactccggcatttggaaagggatgcaaggctgcgtgggattcaggctgaaattgcggtaaaacggaaacaccttgccgatatacaggatatgtttcaaaagcagacagagcaggtcattcgttcatatcgcagctcagaaaagccgtcttcctttgtgtagtgcaggaatgtgccattccccggccggaatggctcttttattttcatttttcaatttgtaacgttataataggtaaaagacgttgtcggtaagcaaatttggacatactaactgtagggctttatagaaagtaggggagaaatatgggctatcccaaggaaggagaaaccattcaaattcacagctataagcacaacgggctgattcatagaatttggaatgagacaacaatcttaaaaagtacagaaatgtgtgtcatcggagccaatgaccggacgatggtaaccgaatcagacggccggacatggataaccagagagcccgcaatctgttattttcacgcaagacaatggtttaatgtcatcgggatgctgagggaagacggggttcattattattgcaacatcagttctccgtttgcctatgatggcgaagcaattaaatatattgattatgacttagatgttaaggtttttcctgacatgacctacaatattctcgatgaagacgaatatgatgatcatcggaaagccatgaattatccaaaagaaatcgacagtattttaagagactacttaaatacgctgctccattggattcaccagcgtcagggaccgtttgcgcccgagtttgtcgatatgtggtatgaacggtatttgcgctatacaaaataatggttacgtaaaaacctgttgcggggtacaacaggtttttcacatgggctcacacacatcatgataaagagagagggggaatcaacgtgggggttatgaaacgctacatgcaattcgtcaaaccttataagaagcaaattttcgttacagtattaatcgggatcgtaaaattctccattccgcttgctctcccattgcttctgaagtacgtagttgacgacattattcaaggaggcggcacggccagtgacaaaaccacgtcattgttcacgattatggcgatcatgttcgccttatttttaattttgcgcccgcctgttgaatattaccggcaatattttgcccagtggactgccagcaaggtgctttatgatataagagctaagctgtttgaccatatacaaaaactgagccttcgtttttacgcgaatacaagaacaggggaagtcatttcccgagtgattaatgatgtagaacaaacaaaggatttcgtcatcacagggctgatgaatatatggctcgatatgctgacgattttgattgtaatctctatcatgctcacactggacgttaaattaacgctgatttctatcgtattattcccattatacggaatatcagtgaagtatttttacggccgtttacgaaagctgacaagggagcgctcacaggctcttgctcaagtgcaggggcatttgcacgaacgcattcaaggcatgcctgtcatcagaagctttgcgatagaagatcatgaacaggctcaatttaatgagaaaaacggtcatttcttagataaagccatccgccacacgaattggaacgccaaaacctttgcggtcgttaataccattacagatttggcgccgctcatcgtcatagcgtgcgccgggtattttgtcattaatggaccgctgacagtcggaacaatggtcgcgtttgtcggatatattgacagaatgtacaaccctgttagaaggctgatcaattcctctacaactttgacacagtcaatcgcatcaatggacagggtgtttgaatttattgacgagccctatgaactcactgacaaaccaaatgcgataaaggccgatcagattcgcggaggagtggagtttcaaaacgtttcgtttcaatatgagaaggacaaagaaaatattcttcatgatgtatccttaaaagtaaatagaggagaaactgtagctctcgtcggcatgagcggaggaggaaaatcaacgctcgtcagcctgatcccaagattttatgatgtaacaagcggcagactgctgattgatgggacggatattcgcgattatgaagcaagaagccttcgcaaccaggttggtatggtgcttcaggatacctttttatttagtgaaacgattcgggaaaatatcgcgatcggcaagcctgatgccacacttgaagagataatcgaagccgccaaagctgcaaatgcccatgaatttatcatgagttttccagaaggatatgagacccgggtgggagaacgaggcgttaagctttcaggcggacaaaagcagcggatctcaattgcgcgggtattcctgaaaaatccgccgctcctcattttagatgaagctacatcagctctggatttggaaagtgagcattacattcaagaagcgatggacaaactggcgaaggatagaacaacttttgttgtcgcccaccgtttatcgacaatcacccatgcggataagattgttgtcatggaaaacggcacaatcattgaaatcggaacccatgatgaactcatggactatgagagccagtacaagcatttatttaccattcaaaatttgaactaaaacatcaatcttatatccttttaacgaaggatataagatttttttgtgtataaaaaaacccggctgtttaaccgggttactcttctgtttctatttcgcagtctttcggatgatacgtttgaaaacttgtgataagtgtttctaaatgttcaagctgctcgcgatattccacggcgcttgccataatattgagcatgttgtaatcaataagctcctcatccgtattctgctgattttttaaaaatgactttgttaaaagctgcttataccggatgccttcttcaaccgcgtcatcatgcggcttgatttttccgacaaacctcatcaaaatccgttcgtgccagtaaagcaggtaatcaagttcttcagtcaatgtttcctgaaactcttccggcatatgatagatctcgttttccagacgatgcagcttcttcaatgtatcaagcgcccgatttgcagtaataatggcctgtctgaacaggacaagctttcttgatttcacataagtcgttttcttaaagtaacttctttcttctttatatagaagatatgtctgatcaagcttgatcattttttctttcagtttttcaatatcctctttcaaaatcgaatgctctgtcgactgccgcatggacaatctgatccacttcataatttcttcggtgttttcgacggtattatgaatcagctttgtttcgtacttaggaggcaaaaacacaaggttgacgataaaggaagaaagcacccctaagatgactgtgcttgttctgatcagcgcgaacattaaaaagtcgtcaccggcagattctaatatcgcaatgactgttacaagagcaattgaaattgtatgttcaattttaagtttcagcatgattgtaatgacaataactgctgttaacccgatcataatcgggctgggtccgaaaataaggccgaacactgtggcaatcacagctccgatgatatttgcttgaacctggtcaataataatgagaaaagagcggtaaatcgacggctggatcgcaaatatcgctgcaattccagcgaaaatcggcgcgggaagcccgatccacgaagccaaataaagggcaagtgtaatcgcaatcccggttttgaaaatgcgggcaccaagtttcattggtttgtgcgtgcattcctttctatagtaaattgtgtgacatagcaaatgggctaatccttaaaattcccggttagtttatttgctaaacaattaagtaatatacagggatcgatacaaatattcaagctatttttctagaaaaagaccaaaatcttacacgttgtttgattccataaaaaaaacaggagctcaaagctcctgttcaaggtatctgattctagtttttaagatgtttaaaagcatcctcgaccgctgcaagcgtgtctttaatatcctgctctgtatgtgctgtggtaataaaccaagcttcatacttagaaggtgctaaattaattccgcgttccagcatcagcttgaaaaacgtagcgaatgtttctccgtcactccgttcagcctgctcgtaattttcgactttctcatcagagaagtataccgtgagcgcaccttttaaccggttgaccgtaatggtgatgccgtgtgtttctgcgtgcttcaaaataccttcctcaagcatagcgccaaggtgatcaagcttttcatacacgcctttttctttgagcacttccagacaagcgatgcctgataggatggaagcggggttccctgccattgttcctgcctgataagcaggtcctagcggagctacctgctccatgatttcttgtttgccgccataggcgccaatcggaagtccgccgccgataattttcccgagtgctgttaaatctggtttcacctgtaagagatcctgcgcgccgccatacataaagcggaaagccgtaatgacttcatcgtaaataacgagagcgcctgcattatgtgtcaattcatttactttttctaagaagccctctttcggctccacgataccgaagttgccgacaatcggttcaacgagaaccgccgcgatttcactgccccatttatcaagagccgctttatagctatcgatatcattaaatggtactgtgatcacttcgtttgcaatgcttttcggtacaccggctgagtctggtgtgccaagagtagacgggccggagcctgcggcgacaagcacaaggtccgaatgcccgtgataacagcccgcaaatttaatgatttttgtccggcttgtatatgcgcgagccacgcggatggtcgtcataacggcttctgtacccgaattgacgaatcttactttgtccatagcgggaatggcttctttgagcatttttgcaaatgtaacctcgtgtttcgttggtgttccatacaatacaccgttctctgccgcttttttaatcgcttctgtaatatgcgggtgggcatgtcctgtaataatcggaccatacgccgctaaataatcgatgtatttgttgccgtccacatcccaaaaataagcgccgcttgctttctccattgcaacaggagaaccgccgccgactgctttatatgatctagacgggctgtttacaccgccgacaatgtgctgtaatgcctcattgtgaagttcaattgattttgtatgcaagaataaaaacctcctatatctccatgcgtcctttctattgtagcatgcttccgaacaagaacaatggcttcgggcttcagattcagctgagatggttgtaatctggacaagaattggatacgcttaataaaaaacatccggaggtaacgtaatgactatagaaatcggacataaagcgcctgatcttgagttaaaaggtgatcatggggaaacagtaaaattatcggattataaaggaaagtacatcgtgctttatttttatccaaaggacatgacaccggggtgtacaactgaagcatgcgattttcgggacagtcacgaaagcttcgctgaactggatgccgtcattatcggcgtcagcccggacagccaggaaaaacacggaaaatttaaagagaagcataaccttccatttctgcttcttgttgatgacgagcataagctggcggaagcatttgatgtgtggaagctgaagaaaaatttcggaaaagagtatatgggaatcgagcgttccacttttttaattgataaagaaggccggctcattaaagaatggagaaaagtaaaagtaaaggaccatgtagccgaagcgcttcaaaccctcaaagatatgtcggaaaagtaaatctctatgagcctatgcttacttttaccctgatatcaattgacaaattatcgtagaaagagttacactaattataaacattacaatgtaagaattttttttagaagagaggtgcatgacggatggctgcacatgaactaaaagaagccttagaaacgttgaaggaaaccggagttcgcattactcctcaacgtcatgcgattctggaatatctcgttaactctatggctcatccaacagcggacgatatatataaagctctggaagggaaatttcctaacatgagcgtagcgacggtatataacaatttgcgtgtgttccgggaatcaggtttggtaaaagagctcacatacggtgatgcttccagcagattcgattttgtcacatccgatcactatcacgcgatttgcgaaaactgcggtaaaattgtggacttccactacccgggccttgatgaagtggagcagctcgctgcccacgtcacgggcttcaaggtaagccaccaccgtttagaaatttacggcgtctgccaagagtgttcgaaaaaagaaaatcattaaaaataagctgaccgcacgaaacggtcagcttattttatttcgacattttctttttattataagactcatcaaattcttttccttctaatcccttatctaaagtcagcggctctcggcaatgcatgcacatatcgactcttcctaaaacctttgtctctttatcacagcctggacaaatgacgcgaaccgctttagtcgaaagcattccgatccaaaagtaaactaccgtgctgagaccgatggataaaagcccaagtatcataaacaaactagaaagcaaaactgactctttgaaaaagatcccgatgtacataatgataaacccaacgaaaaccaaacttaacgcaaatgttctgattttattaattttgctggagtatttcgccatgtccatccccctctgttttaactatagcacaaacccgatgggattttcttcatgttttcggttgaactggaatttacatatggagagttactgtgaaattgtttataatagttcaatgtgtttagaaaaaaggaatttcgttttaaccatagaattgaatcaaatagagaataaaaaaatttgaacaattgcattggaggaatagtgatggaaaatcttctccgtccaatttaccaagaaagagcaagtcaccccaatacattggctgtcattatgattgagagaagaaacaaaacatcttccttaacagataactttgatgcagctttgctggtgattgtaaaggatgctgatgagccagtttttataaagcattatgaatttgatcatcaaacagcttctttgcatgtggtaacagattctcagattcaagaatggattttgcttggaacaaatagaagaatcatagattggattgtaaatggcagagtcttgtttgaccgtaatgaatacgtagttgaactgattgacaggctgaatacatttccgtttgccgaacgtaaactgaagatcggactcgaatacggcaaattaatcagaaggtatgttgaagggaaagctttttttgaagccaatcaatttttagatgcctacaatgccgttgttcatgcgctgcatcatttagcacgtattgaagtaatcgacagaggattccatcccgaaaccacggtgtggagccaagtgcgccagatggagccccaagtgtacaaattatattccgagctgattgaaagtcatgagagcctggaaaaaagacttgaattattattcttagcaaatgattttctcatccattccaaagccgagatcggttcggcgcatcttttcgaagtaatgaaagaaaaagacatttggcaattcggtgagcttcttcaacatcatgacctaaagcactttacccaagatcttggcgttatgcttgattacttgacagaaaagggacttatcaacgtctgccagatagaaacgaaaggacaggctgtctatcaccgaggatattcttttaaaaaagatgttgactctgattcttgaccgtgttatattattaaacgtcgctgatgcgcttctgagaaaacaagctcacagcggcgggaaaataaatcaaaaaaacatttgacaaaagaaagtcaaaatgttatattaataaagtcgcttcaacaagaagtgaaaatgatctttgaaaactaaacaagacaaaacgtacctgttaattcagtttttaaaaatcgcacagcgatgtgcgtagtcagtcaaactagggtctgcacgacgcaggtcacacaggtgtcgccgcagaaagcggtgaacttaacctgtgatccatttatcggagagtttgatcctggctcaggacgaacgctggcggcgtgcctaatacatgcaagtcgagcggacagatgggagcttgctccctgatgttagcggcggacgggtgagtaacacgtgggtaacctgcctgtaagactgggataactccgggaaaccggggctaataccggatggttgtttgaaccgcatggttcaaacataaaaggtggcttcggctaccacttacagatggacccgcggcgcattagctagttggtgaggtaacggctcaccaaggcaacgatgcgtagccgacctgagagggtgatcggccacactgggactgagacacggcccagactcctacgggaggcagcagtagggaatcttccgcaatggacgaaagtctgacggagcaacgccgcgtgagtgatgaaggttttcggatcgtaaagctctgttgttagggaagaacaagtaccgttcgaatagggcggtaccttgacggtacctaaccagaaagccacggctaactacgtgccagcagccgcggtaatacgtaggtggcaagcgttgtccggaattattgggcgtaaagggctcgcaggcggtttcttaagtctgatgtgaaagcccccggctcaaccggggagggtcattggaaactggggaacttgagtgcagaagaggagagtggaattccacgtgtagcggtgaaatgcgtagagatgtggaggaacaccagtggcgaaggcgactctctggtctgtaactgacgctgaggagcgaaagcgtggggagcgaacaggattagataccctggtagtccacgccgtaaacgatgagtgctaagtgttagggggtttccgccccttagtgctgcagctaacgcattaagcactccgcctggggagtacggtcgcaagactgaaactcaaaggaattgacgggggcccgcacaagcggtggagcatgtggtttaattcgaagcaacgcgaagaaccttaccaggtcttgacatcctctgacaatcctagagataggacgtccccttcgggggcagagtgacaggtggtgcatggttgtcgtcagctcgtgtcgtgagatgttgggttaagtcccgcaacgagcgcaacccttgatcttagttgccagcattcagttgggcactctaaggtgactgccggtgacaaaccggaggaaggtggggatgacgtcaaatcatcatgccccttatgacctgggctacacacgtgctacaatggacagaacaaagggcagcgaaaccgcgaggttaagccaatcccacaaatctgttctcagttcggatcgcagtctgcaactcgactgcgtgaagctggaatcgctagtaatcgcggatcagcatgccgcggtgaatacgttcccgggccttgtacacaccgcccgtcacaccacgagagtttgtaacacccgaagtcggtgaggtaaccttttaggagccagccgccgaaggtgggacagatgattggggtgaagtcgtaacaaggtagccgtatcggaaggtgcggctggatcacctcctttctaaggatattatacggaatataagaccttgggtcttataaacagaacgttccctgtcttgtttagttttgaaggatcattccttcgaaatgtgttctttgaaaactagataacagtagacatcacattcaattagtaacacaagatatcacatagtgattctttttaacggttaagttagaaagggcgcacggtggatgccttggcactaggagccgatgaaggacgggacgaacaccgatatgcttcggggagctgtaagcaagctttgatccggagatttccgaatggggaaacccaccactcgtaatggagtggtatccatatctgaattcataggatatgagaaggcagacccggggaactgaaacatctaagtacccggaggaagagaaagcaaatgcgattccctgagtagcggcgagcgaaacgggattagcccaaaccaagaggcttgcctcttggggttgtaggacactctatacggagttacaaaagaacgaggtagatgaagaggtctggaaaggcccgccataggaggtaacagccctgtagtcaaaacttcgttctctcctgagtggatcctgagtacggcggaacacgtgaaattccgtcggaatccgggaggaccatctcccaaggctaaatactccctagtgaccgatagtgaaccagtaccgtgagggaaaggtgaaaagcaccccggaaggggagtgaaagagatcctgaaaccgtgtgcctacaagtagtcagagcccgttaacgggtgatggcgtgccttttgtagaatgaaccggcgagttacgatcccgtgcaaggttaagcagaagatgcggagccgcagcgaaagcgagtctgaatagggcgcatgagtacgtggtcgtagacccgaaaccaggtgatctacccatgtccagggtgaagttcaggtaacactgaatggaggcccgaacccacgcacgttgaaaagtgcggggatgaggtgtgggtaggggtgaaatgccaatcgaacctggagatagctggttctctccgaaatagctttagggctagcctcaaggtaagagtcttggaggtagagcactgattggactaggggcccctaccgggttaccgaattcagtcaaactccgaatgccaatgacttatccttgggagtcagactgcgagtgataagatccgtagtcgaaagggaaacagcccagaccgccagctaaggtcccaaagtatacgttaagtggaaaaggatgtggagttgcttagacaaccaggatgttggcttagaagcagccaccatttaaagagtgcgtaatagctcactggtcgagtgactctgcgccgaaaatgtaccggggctaaacgtatcaccgaagctgcggactgttcttcgaacagtggtaggagagcgttctaagggctgtgaagccagaccggaaggactggtggagcgcttagaagtgagaatgccggtatgagtagcgaaagaggggtgagaatcccctccaccgaatgcctaaggtttcctgaggaaggctcgtccgctcagggttagtcgggacctaagccgaggccgaaaggcgtaggcgatggacaacaggttgatattcctgtaccacctcctcaccatttgagcaatgggggacgcaggaggatagggtaagcgcggtattggatatccgcgtccaagcagttaggctgggaaataggcaaatccgtttcccataaggctgagctgtgatggcgagcgaaatatagtagcgaagttcctgattccacactgccaagaaaagcctctagcgaggtgagaggtgcccgtaccgcaaaccgacacaggtaggcgaggagagaatcctaaggtgatcgagagaactctcgttaaggaactcggcaaaatgaccccgtaacttcgggagaaggggtgctctgttagggtgcaagcccgagagagccgcagtgaataggcccaggcgactgtttagcaaaaacacaggtctctgcgaagccgtaaggcgaagtataggggctgacgcctgcccggtgctggaaggttaagaggagcgcttagcgtaagcgaaggtgcgaattgaagccccagtaaacggcggccgtaactataacggtcctaaggtagcgaaattccttgtcgggtaagttccgacccgcacgaaaggcgcaacgatctgggcactgtctcaacgagagactcggtgaaattatagtacctgtgaagatgcaggttacccgcgacaggacggaaagaccccgtggagctttactgcagcctgatattgaatgttggtacagcttgtacaggataggtaggagccttggaaaccggagcgccagcttcggtggaggcatcggtgggatactaccctggctgtattgaccttctaacccgccgcccttatcgggcggggagacagtgtcaggtgggcagtttgactggggcggtcgcctcctaaaaggtaacggaggcgcccaaaggttccctcagaatggttggaaatcattcgcagagtgtaaaggcacaagggagcttgactgcgagacctacaagtcgagcagggacgaaagtcgggcttagtgatccggtggttccgcatggaagggccatcgctcaacggataaaagctaccccggggataacaggcttatctccccaagagtccacatcgacggggaggtttggcacctcgatgtcggctcatcgcatcctggggctgtagtcggtcccaagggttgggctgttcgcccattaaagcggtacgcgagctgggttcagaacgtcgtgagacagttcggtccctatccgtcgcgggcgcaggaaatttgagaggagctgtccttagtacgagaggaccgggatggacgcaccgctggtgtaccagttgttctgccaagggcatcgctgggtagctatgtgcggacgggataagtgctgaaagcatctaagcatgaagcccccctcaagatgagatttcccattccgcaaggaagtaagatccctgaaagatgatcaggttgataggtctgaggtggaagtgtggcgacacatggagctgacagatactaatcgatcgaggacttaaccacattttgaatgatgtcacacctgttatctagttttgagagaataagtttttcaaaaaaacacttgattttctcaagaatacatagtataatgttaaatgtcactgaaattgtctggtgatgatggcgaagaggtcacacccgttcccatgccgaacacggaagttaagctcttcagcgccgatggtagtcgggggttccccctgtgagagtaggacatcgccaggcagacttcattccgcagtagctcagtggtagagctatcggctgttaaccgatcggtcgtaggttcgaatcctacctgcggagccattattggagagctgtccgagtggtcgaaggagcacgattggaaatcgtgtaggcggtcaactccgtctcaagggttcgaatcccttgctctccgccactgatacttatacataattacaattgaaagtctgggcccgttggtcaagcggttaagacaccgccctttcacggcggtaacacgggttcgaatcccgtacgggtcattatatgatggaggattagctcagctgggagagcatctgccttacaagcagagggtcggcggttcgagcccgtcatcctccaccattatatcatcgcggggtggagcagttcggtagctcgtcgggctcataacccgaaggtcgcaggttcaaatcctgcccccgcaaccaaattttaaaatggtccggtagttcagttggttagaatgcctgcctgtcacgcaggaggtcgcgggttcgagtcccgtccggaccgccatttaaatacttaggctcggtagctcagttggtagagcaacggactgaaaatccgtgtgtcggcggttcgattccgtcccgagccaccacctatgccggtgtagctcaattggtagagcaactgacttgtaatcagtaggttgggggttcaagtcctcttgccggcactgttttttcaaaatttaatgtggaggggtagcgaagtggctaaacgcggcggactgtaaatccgctccctcagggttcggcagttcgaatctgcccccctccaccatttataggggcatagtttaacggtagaacagaggtctccaaaacctccggtgtgggttcgattcctactgcccctgccaaatttatgacatcttgagattatggcggttgtggcgaagtggttaacgcaccagattgtggctctggcactcgtgggttcgattcccatcaatcgccccatattatcattgggctatagccaagcggtaaggcaacggactttgactccgtcatgcgttggttcgaatccagctagcccagtctcactttttatatcaactgcatataatgtattaagtccattaaaaatgcggaagtagttcagtggtagaacaccaccttgccaaggtgggggtcgcgggttcgaatcccgtcttccgctccaattacggcggcatagccaagtggtaaggcagaggtctgcaaaacctttatccccggttcgaatccgggtgtcgccttcttattgccggggtggtggaattggcagacacacaggacttaaaatcctgcggtaggtgactaccgtgccggttcaagtccggccctcggcaccaattttacttacatggtaagttgaattggtgtttgtgttttatcattataactaatcatattaatgatctacttatgtagatcatttttttaatgctttgatttatcataacaagttaagttccgaggcctattataaagcggctgtatagctagtctttcaacacttttattttatatttccataaaaacttttttgaaatacgttgacactttatgagattcatgatatatttatattcgtcggttagatacgacgtaaaacttgccggtgtggcggaattggcagacgcgcacgactcaaaatcgtgttccttctggagtgtcggttcgaccccgaccaccggtatactgaaaaacccgtttcttaacagaaacgggtttttattttttattaaagaaaaggagccgaggctcctttttatacttactcagcgtattggtctaggatctcttctagcacctcttctagctcttctgtatcttcaagctctgattggctgaaacggacgcgtacaagctgttctccgtcattatacatctcttccagccaccctcggagtcctcttgctctgcggtcgacttcgaaaatgatttccaaaccgtcttcgtctaaaaggaaaatgagctctaattcatcaagcatctgacgataatatccggaagtcggaacgaattcgaattcttgaacaaacggaagacgacgctggaagtatggcgcttgttcgcagtctgcttcgttaagacggaagcccaggttttcgattgcttcaagcacattttcaatccaagggtgcgcttcaacgaaaatacggtcatgatcggatttatcgataccgccttgaatgtcaaggtctgtcaccacggcaacctctactttccctacagtgatcggcgtatctagaggcagagtgaatgtgaacggaaattgatgctcttcaccaggctgtatggtaaatgaaccagtgacccggaaagaatgaattgtagcgtatttccggtgctcttcatcgtcttttacaatgacataccgtgtgctaagctgtaaatcgatataacggatgtcctgagcgatttttccgcctttgacatgtaccgttccctgtacttcttctcctggaaaatatgcgtctttttctaaaattgtatctacttttgcagctccaattccggcacttgccgcaagcttcttaaaaaatgacatgttagatcttcccctttttcttttttctcaacagatatacgtaagaaggaggaaaaaagattcgtttgattcatacttttttcctattattcgtctcggcctagggacagactaagaataatattgaaaataaaggagtggatggaagtgaataaagaaagtttggttgcagatgaattacacagaatgtttttggccggtgagctgcaaatcacagtagaggaggatataaacagtatttccgaaaggctgagaaacggtgatctcagtttagaccgattaagcggtgaagacgcgtttataaaagaaacggtaaacgaggctttaagaagagtggagcaataaaaaagagacggcatctcatctttgagatcccgtctctttttgtggtctttactgcaagataaaagcgtaattgctcacccgagccaccccttttctaacagaagatctgacagttcatcatggagataaacagttgtatctaattgatcatgcaatgctcttctgatgtggggattttcggcttctgttattgcgacagtgtatttgttaatgctggtttttattgttgttaacaaatcaagaatatctttgggacaaagactttgttcaatgggaaaccacctcctttgttttttagcagctcctgataagaaagtatttggctttgtttcttgcttctatacaaaatgctataataagcaacaaattttgttggggggtgtgatgatgaagcagattattgcgatgggaggcgggggtttttcgatggagccggataatttgtccctcgatcaatatatcctcaatcaatcaaaacgagagcagcctcgtatttgttttttgccgacggcgagcggagattcccaaaactatattcagcggttttatcatgcatttcaaacattggattgcgtgccgtctcatttatctttgtttaagccgccatcatcagatttagcttcttttgttatggaaatggacgtgatttatgttggcgggggaaatacgcggaatttacttgtgttatggaaagagtgggggctggaccatattctcagggaagcatggaagaacggtgtggttgtagctggaataagtgccggtgcgatctgctggtttgaagaaggggtgacagatcagccggaccgctgacaagtttgaaaagtttaggttttttgcaagggagcttttgtccccattatgacggggaaaaggatcggagaccggcgctgatatctaacaagttcttatgcagtggctatgcagcggatgatggggctgctctccatttcataaatgatcagctgtttcagactgtgagttcaaggtcgggtgcaaaggcatatcgggtgatgatggctgaacatgaaatagctgaaatcccgttgccggtcaaatatttagggtgaaattggctgaatattatctatattcctctttttttcagattgattttatgataagatgagtgcgaaatcaatagttactgggggtgcccgctttcgggctgagagagaaggtaagcttcttaaccctttggacctgatctggttcgtaccagcgtggggaagtagaggaattgtttttgttattgtcttgctgggcaataatatgtttctttctgactgtaaccgggttcatttatatgaatccggttttttgtgctggttatgggcttgattttgtcctttcaaacgtagagaggggaaggaaaagtaatgcaaaacaattcagtgcagcaagccaacatttccattatgtcaagtttttcaggcagcaagaaggtatacgtggagggttcttcttcggacatccaagtgccgatgagggagattgcattgagtccgacgacgggatcgttcggcgaagaggaaaacgcgcctgtgcgtgtctatgatacaagcggaccgtatacggatcctgaagtaaccattaatattcaagaaggattaaagccgctccgccaaaaatggattacacagcgcggtgacgtggaagagtatgaaggtcgggctataaaaccagaagataacggttataaaaaagcaaatccaaacgtaagctacccaggattaaagcggaaaccgctgagggcgaaggcaggtcaaaatgtcacacaaatgcactatgcaaaaaaggggatcattacacctgagatggaatttatcgccattcgtgagcatgtgtctcctgaattcgtcagagacgaggtagccagcggccgggcgattattccttcaaacattaatcaccctgaaagtgagccaatgattatcggccggaattttcatgtgaagattaatgcgaatatcgggaattcagcggttacgtcatccattgaagaagaagtggaaaaaatgacgtgggccatccgctggggagcggatacgatgatggatctctctaccggaaaagatattcatacgacgcgtgaatggattatccgcaattgccccgtgcctgtgggaactgttccgatttatcaggcgcttgaaaaagtaaacggcgtagcggaggatttaacgtgggagatttatcgtgatacgctaatcgagcaggcagaacagggagtggattattttacgattcacgcgggtgttttgcttaggtatgtaccgctgactgccaaacggacaactggtattgtgtcacgcgggggagcgattatggcgcagtggtgtctggctcatcatcaagaaagctttttatacacacattttgaagaaatatgtgagattatgaaaatgtatgatattgctttctctcttggggatggtttgcgtcccggatcaattgctgatgccaatgacgaagcgcagtttgctgaattagagacgcttggagagctgacgcaaattgcctggaagcatgatgttcaggtgatgattgagggtcctggacatgttccgatgcataaaatcaaagagaacgtcgataaacaaatggacatttgtaaagaagcgcctttttacacattggggccgttgacaacggatattgctccgggatatgaccatattacttcagcgatcggagcggcgatgatcggttggtacgggacagcaatgctttgttatgtaacgccgaaggagcatttagggctgccaaaccgtgatgatgttcgtgaaggagtcattacatataagatcgctgcgcacgctgcggaccttgcaaaagggcatcccggagcgcaaatccgggatgatgcgttatcgaaagcccgttttgaattccgctggcgggatcagtttaatttatctcttgatccggagagagcccttgaataccatgatgaaaccctgcctgctgaaggagcaaaaaccgctcacttttgttccatgtgcggtccgaaattttgcagcatgagaatttcacaggatattcgggattatgcgaagaaaaacgatctcagtgaagcagaagctataaataaaggattaaaagaaaaagcaaaagagtttgtcgatacgggaagcaatttatatcaataaaaaaaatgaagatggagaatgctccatcttcattttttttagaaaaacagagagcgtcgaagcggcggaatactctgttcaaagcggaaaacattttctggatcatatttcgttttgacacggcggagtcgttcaacgttttcgccgtaatatgttcttggccagtttctgatttcgatatctggccaatttacgtagtctcccatcgtttctctcgaaagggacgttctcagcccctcaatccagcggacattttgtcttttttcttcaggagatgtccagtttgttaagtattcctgggcgatgattgcatcacgataataaaatgccgtttggtcgggagcgatccgtccggctgccccgccgagtgcttgctgccagacactggcgttttgattcggagcgtgctctaaaaagtgttttattgttgagatcggacgttctgataatggcttttcaatgaaagagccggagcgtttcattttttgaggctgattgcctcccgggctgttaaaaaaggttaccgcttcgatgaacggcattgtttttaccattccgcttgttgggcttcctgctttcaataaagtctttaacagtttttttaactctgtttttggcccgacaaattggccgagggcttctatgcggtttacttctttaggccaaaactctattgatgatgtaagccggtcatctgtatacggggcccagtgctgccacgtgttaaatacttcctcaaaatcatcccatccccatgtaatagaaaaaatcgacacttgagagatgggcactgctttaaatgtcatggaggtgactatgccgaaattgcctcctccgcctccctgagacgcccaaaataagtctggatgatttgaacagctgactgtaatcagatcagcgccctctttttcgtctgctacgatcatctcaagctgcacgaggctgtcgcaagtaaggccggcagcccttgttaaaagtccaattcccctccgagagttaaacctgtgagccctacattggcaatggtgcctgcgggaagcgtcaggccgtattgccagagtgtccgatagacttctcccaattcagcccccgcttcaatataggccagctttttatcctgattcacagttatttttttcatttcgcttaaatcaataacaagaccgttatttaaaagggaaaagttctcatagctgtgtctgccgcctctaatacggaaaggcacacggttttcacgcgcccatttcagcgcattgagtgcatcctgtttgttttggcaaaacacaatgatgtcaggatacctttctaagcttaggttaatattggttcttgcttcgttatagtccggatcatcccgtgtcacgatacgtccggtcaattttgtcttttccacactcccacatctctttctctcgtattctagtttctctagcttatgcgtcaagggaaaagagtgtataaggaaaaagcggggatgcaatctgatacagtgtcaactcccttaaaaaatagttgacaggtcggtattgtatgaattaacatggtcagtacaaatttttcaaatttatcgcgctgatcggaacaccgaaggctcttatcgtttagataagggccttttttgtatgaaaaaggagggattattgatgggagtcaaaaaagaaaaggggagaaaacgattcagaaagcgaaaaacctacgggaatcagattttgccgcttgagctgctgattgaaaaaaacaaacgagagattataaacagcgcggagctcatggaagaaatttatatgaagattgatgagaagcatacgcaatgtgtaactaaatagaaaaaaacccgctgattacagcgggtttttgcatttctacattaagcatcttttttaatcggcaatccaaggccttctgccacgcgttttccgtattcaggatccgctttgtagaagtgctcgatttggcgcagtttgatttcttctttttctaccggcttcatagcattaacgatattttcaacaaggcgggtacgttcatcttcactcattaaacgatacagatcaccggcttgagtgtagtgatcgttgtgatcgtagcttacgctgtcagcgatgccttgtaccggatatgctgcttgcttatcctcaggtgactcttttggaccgccgaagctgttaggctcgtaatacacagatccgccgccgttatcatcaaagcgcatttgtccatcacgctgataattgtttactttgttgcgtgcgcggttgattggcagcgcttgatggtttgcaccgacacggtagcggtgtgcatcatgataagcaaacagtcggccttgaagcattttatccggtgaaacatcaataccaggcacgagtgttccaggtgaaaatgtcgcttgttctacctctgcaaagtagttttccggatttctgtctagaaccatgcgtccgacctcgattaacgggtagtctttttgagaccaaacttttgtgacatcaaacggatcgaaacggtacgtgtttgcatcttctaaaggcatgatttgcacatatagtttccatgcaggataatcaccgttttcgattgcattgaaaaggtcttctgtatggtaatcagggttttcaccggcaatttttgctgccgtattgacatcaaggtttttcacgccttgttccgttttaaaatgatatttaatccatacgccttcgccttcggcatttgtccatttgaatgtatggcttccgaagccgtgcatgtggcgaagtgttgcaggaattccgcggtcagacatcaggattgtcacttggtgaagtgactctggtgaaagtgaccagaaatcccatacagccgttgggtttttcaggtgtgtttttggatctcttttttgtgtatggatgaaatcagggaacttaatcgcatcgcggataaagaatacaggcgtattgttgccgacgatgtcgtagtttccttcttcagtataaaatttaacagcaaatccgcgcgggtcgcgaactgtgtcagcagagccaagttcaccggcaactgttgagaaacggatgaacaacggtgtgcgtttgccgacttcagaaaggaaagcggctttcgtgtattttgttacgtcgtttgtcacttcaaaatatccgtgtgcgcctgctcctttggcgtgaacaacacgttcaggaacacgttctcggttgaaatgggccaatttttcgagtaaatgtacatcttgaattaaagttggtccgcgagaaccggcagtcattgagttttgattatctccaaccggagcgccccagctagttgtcagtttatttgaactcatgttatcacctcttggaatttataagaacataatatcatctctaagtaaaaagtcaatattattttataattattataaaatagttatctctattaagcgatatctagtattgaaagtgtggaaaaaccttgttggaacagctttttatggcacttgataatttttgaagaaataatttttccttctctatttgcgaaacaagcagagtaagtgataaacaaggatatcaaaaatcgtatttaaaaaagagttgacatatcggaataatttgaattaacatgttattcaaacaaaaaacaattgggcagctgatcggaccgccgaaggctctcatctctacaagaacagagatgggggcctttttgttttttttgaaggcggggttggcagaaagagagggataaaagtggctgtgaccatcagcatcaaagaaaaggcatttgttcaagagggccgcaaaaacacggtcttagagaacatagaattatcaatcgcaccaggcgaatttctaacgcttatcggaccgagcgggtgcggaaaaagcaccctgttaaagattattgcagggcttgattctgaatatgacgggagtgttgaaattaacggccgcagcgtaacagctccgggtattcagcaaggatttatttttcaggaacaccgcctctttccttggctgactgttgagcagaatattgcagccgacttgaatttgaaggacccaaaagtcaaacaaaaggtggatgaactgatcgagattgtcagattgaaaggatcggaaaaagcatatccgcgcgagctgtcaggcggcatgtcacagagagtagccatcgcccgggcccttctgcgggagcctgaggtgctgcttttagatgaaccgtttggtgcactcgacgcttttacaagaaaacacctgcaggacgtgctgctggatatatggaggaggaaaaaaacaacgatgattctcgtgactcatgatatagatgaatctgtttatttaggaaatgagcttgcgatccttaaggccaaaccggggaaaatccataagctgatgcccattcacctggcgtatccgcgaaaccggacgactccggatttccaagcgatcagacagagagtgctgtcggaattcgagaaaacagaagatttggagtacgcagaaggatcagggatatagaaagggcggaagcggaaatgaaaaaaggactcattgtattggttgccgttatttttctgctcgcaggctgtggagcaaatggagccagcggtgaccacaaacaattgaaggaaatacgtattggtattcagcaaagcttaagcccgcttttgatcgcaaaagaaaaaggctggttcgaagatgcatttgaaaaagaaggcatcaaagtgaaatgggtggagtttcaaagcggtccgccccaatttgaaggccttgcggcagacaaacttgatttttctcaagtcggtaattcgcctgtgatcgctggacaggcggcaggcattgactttaaagaaattggcttatctcaggatgggttgaaagcgaacggcatccttgtcaaccaaaacagcggcattcaggacgttaaggacttaaagggaaagaaaattgcagtcgctaaaggcagcagcgggtttgattttttgtataaagcgcttgatcaagtggggttgtcagctaacgatgtgacaattattcagcttcagcctgatgaagcagcttccgcatttgaaaacggatctgttgatgcctggtccatttgggagccgtacttgtccttagaaacaatgaaacacggggcaaaaatccttgtgaacggagaaagcacagatttatattccccgggttttactttagtaagaacaaagttttcagaggagcatccagacgaagtggtccgttttctgaaggtgtttaataaagccgttgtatggcaaaaggaacatctggatgaagcagcggacttgtattctgacattaaagatctcgataaaaaggtcgtcgaaaatgtgctgaaaaatactgaacctctgaatgaggtcatcagtgacgacattgtgaaagcgcagcaggaaacagcagattttcaatttcgaacaaaggcgatagataagaagattgatgtgaaggatgttgtcgataacacttttatcaaaaaagcattaaaggaacattcctcaggaggtgatcaatgatgaaagcagaggctgcgggctcgctgcccaaaacgaatgcggaagcggtgcgaaaaaagcccggaaggaagagatacggctggatgaaggggcttttactgcccgctgtcatcattgccatctggcaggtcatcggcgggctgggggttgtgtccgctacagtgctgcctacacctgttacgattgttctgacctttaaggagcttattttgtccggcgaactgttcggccatctgcaaatcagcatttatcgggcggcacttggttttttgcttggcgcggggcttggattgatgatcgggattttggccggattttccaaacggacggagctgtatcttgatccgtcgttgcaaatgcttagaaccgtacctcatctggccgtcacgccgctgtttattttatggttcggatttgacgaagtatctaaaattttgctgattgcgctcggtgccttctttcctgtctatatcaatacgtttaacggcatccgcggggttgacgcgaagctgtttgaagtcgcccgggtgcttgaatttaaatggcatcagcagatatccaaagtgatattgccggcagccctgcccaatatattgctaggcattcgcttatcgctcggcattgcatggctcgggctcgttgtggcagagttgatgggctcaagctcgggagtcggctatatgatcatggatgcgagacagttttcacaaacgaataaagtctttgcagggattatcatttttgcagtggttggaaagctgacggattccttcgtcaggctgctggaacgaaagctgttaaagtggagaaacagctacgaaggataaaagatataaaggggagatgaatatggaaattctttggtttataccaactcatggagacgcgagatatttaggatctgaaagtgatggacggactgcggatcatctttactttaaacaagtcgcgcaggcggcagacaggctgggatatacaggagttcttctgccaacgggaagatcgtgcgaggacccgtggcttacagcgtcggcactggcaggagaaacaaaggacttaaagtttttagtcgcggtaagacctggtttaatgcagccttctctggcagccagaatgacatccaccctagaccgcatttcagacgggcggctgctgatcaacgttgtggcagggggcgatccgtatgagctggcaggcgatggcctgtttatcagccatgatgagcgctacgaggcaacagacgaatttttaaccgtttggcggagacttttgcagggagaaacggtttcctatgaaggaaagcatataaaagtggaaaacagcaatctgcttttcccgccgcagcaagagccgcatccgcccatctatttcggtggttcgtcacaggctgggattgaagctgccgcaaagcatacagacgtatacttgacatggggggagccgcctgaacaagtaaaagaaaagatagaaagagtcaaaaagcaagcggcaaaagaagggagatccgttcgatttggcattaggctgcatgtcattgcccgtgaaactgaacaagaggcatgggaagcggcagagcgcttgatcagccacttggatgatgacaccattgccaaagcgcaggcagctttgagccgttacgactctacaggccagcagcggatggccgtccttcatcaaggcgatcggacgaagcttgaaatcagtccgaatctgtgggcggggatcggcctagtcagaggaggggcaggaacagctcttgtcggtgatccgcagacgattgccgaccggatagcggagtaccaggcactcggcatagaatcgtttatattctcaggctatccgcatttagaagaagcgtattattttgcagagcttgtatttccgcttttgccgtttgaaaatgatcggacgagaaagcttcagaacaaaaggggagaagcggtaggaaacacttattttgtcaaagagaaaaatgcatgagtttaataaaaatacagcccccaaacatggtatgatattcaaaaaaagggggctttttttctgaaaacattgagaagcgcggcagtcatttgcctcatagctatgctgtcagcatgcggacattcaaaacagatggaaatcaaagcggcggacatatcagaacttgaaaaaaacagaatggatgtcgcagcttcacaggcattcactgccgaagccgtcaatatcggtgaaggtgtttcttcagctgacatgtacatcgaacattatcaaaagggaaagcttgttgagaggtttggaccggctagtgcagattattcagaggaaaaacccgataccatacaatttgtttattttgagaaggaagagggggaaggaaagaataaacataccaccattcattttggcattgtggataaacagggaaatatagcggctgattcatcggtgaaacgtgacgatagcacaacacaggaaatgactcagaatatttcatcgccggaaccgattactttcgagaagcctgctttgatcggcagcagtattagagggactgacgagacaatgcacacctctgaacataaaaaagagctcattaagcatcaagatgcgttactgtattatgtggaattgcatcattagaatgggcggcttcaggccgtctgttttacaaagcggtatgcttgcttttttgaatggtgcatgatacattttaaatagtaacaatttcgatttaaagggaggctatgtgacttggctaaaaaatcaaaagtggcaaaagagttaaaacgccaacagcttgttgagcaatacgctgatattagacgcgagttgaaggaaaaaggagattacgaggcactcagcaagctgccaagagattcagcaccgggaaggcttcacaaccgctgcatggtaacggggcgcccgagagcatatatgaggaagtttaaaatgtccagaatcgctttcagggagctggcccataaaggccagattcccggtgtgaaaaaagcaagctggtaagaaaaaactccggccgattacagcgcgccggagtttttttcgtttttcttgaaagagatgacgtaggaaaggtgctggatgatcatgatgataaacacaataataatagggaaaaacggaatacgcgattgaaaaagcggataaaaaatgagaagaaccgctgcggcaggcagcgagaagtagacagcgatatatgacgcgcgacatgcttttgccgtcatcatctgctctctttcatcctgctcttcaaactcatcaggcagaagaagctgctttctggcagggcggctttttttctgtaagtacaaataaaccgcaaacgccgcaacaaacagaataaagggggtgaggtttaattcaaataccatcccgccgctctttgtgccgaaaaaagatgctatgccttctgaggcttcaaagtatgaaatcagcgcccagcatgcaaggccaaataaaacaaggtgaaaagctgcttttgttttcatgctcatcttagttttcctcctctaaccaaaagacatcctccattttcatggagaaggctttgcagattttcagtgctaacagcagtgagggaacataatcgcctttttcaatcgctgccacagtctgtcttgtgacgccgaccgtttctccgagtttttcctgagaatagccgaagcgtgccctcagctcttttactttatttttcatcatgacgtctgtccccttcacaatctcgattgattatattgtatagtatacttaacattatgtaaatggaacttaacaactttacaaaaagataactttttttcgacaaaatttttatattcccttgacgaaaaataaataaacatgtaatataaaaaaagtcagagcggtactgttgctgacaatcacaaatgcgggtgtagtttagtggtaaaacctcagccttccaagctgatgtcgtgagttcgattctcatcacccgctccatacatacgttattaacgcagtgtttcgtttctcagataaacgaagtattgcgtttttttatgtaaaaaagaacacgacattcgtgttcttttacgtaagccaatgtactgtatgggtgccgccgtgaatttgttcaaacattttcgttaatgatgataagaggttaacagcgctgcttttctcaatcgatggcgggaaaaaaatgatttgcagcatattcttagtctcgtttgaaacgggatagtggttgacgctgtttttgaaatcgccaaaaatgccgttttcatcagagaaaagcagtatgttttctttttctcccaatgagatccggaccggctcatgaagctttccggcatcataaatcataataggcagagaatattttaatgcgaaaaaatcgattgtgtcatgggccgagtctttactttccatgaattgttccttggatatcgggaccagcatgtcctccattggggttgtttctccctcaaatgaagggttaagctgtttaaagagtttctgccattccttgacgaaggattcatcggatataccgccgtccgcatagtcgaaaaacaaggattcttgaaacaggcggagtctgcctttcagcatttgcggtgaggagccgacttcgatattctcataaatgacagcagctgcatgtaagccggccgcacgttcagtaataacagaatcaagtttgatattcactagcattcactccagttacgtgatatcaacctattataaacgctgtatcgttttatcacaaagaaaggaggctgtgcaaaacatgaacgtttatcagctcaaagaagaattaattgaatacgcgaaaagcattggcgtggacaagattggttttacgactgctgatacttttgacagtttaaaagaccgtttgattcttcaagaatcactcggctatctctccggctttgaagagccggatatcgaaaaaagggtgacgccgaagcttcttttgccgaaagcgaaatcaatagtggcaattgctctcgcatatccttccagaatgaaggatgcgccgagaagcacgagaactgagcgcaggggcattttttgcagagcttcctggggaaaagactatcatgatgtgctgagggaaaagcttgatctactggaggattttctaaaaagcaagcatgaggatatcagaacgaagtcaatggttgatacaggtgaattgtctgatcgcgccgttgcggaacgtgccggaattggattcagtgcgaaaaactgtatgatcacaacacccgagtatggctcttatgtgtatttggcggaaatgatcacaaatatcccttttgagcctgatgtgccgattgaagatatgtgcgggtcctgcacgaaatgcttggacgcctgcccaacgggagcactggttaatcccgggcagcttaatgcgcagcgctgcatctcttttctgacccagacaaaaggatttttacctgatgaattccggacaaaaatcggaaaccgcctgtacgggtgcgatacgtgccaaacggtatgccctctcaataaagggaaggattttcatcttcatccggaaatggagcctgatcctgagattgccaaaccgttattgaagccgcttttgaccatcagcaatcgggaatttaaggagaaattcgggcatgtctcaggttcttggcgcgggaaaaaaccgattcagcgaaacgccattctcgcgcttgcgcattttaaggatgcttccgcactgcctgaattgacggaactgatgcacaaggatccgcgtcctgtcatcagggggacagccgcatgggcaatcggaaaaatcggagaccccgcctacgcggaagagcttgaaaaagcgctggaaaaagagaaggatgaagaggcaaagctggaaattgaaaaaggaattgagttgctaaaagcttcaggcatgactaaacaaggcctgtcctgacatacgtatagagcagaaggaaaaaacacttgagatcatccaagtgttttttctctataaaaaagtatggcgggtggggtgagcttgaagtacattttagaacaattagcggaggagcggctgggctttctggttaacgggcatgctatgagacaggagtctcaagtcggagaccttaaagtcatggagcgtaagaaaaagcttctggaaaaacgtaaagttgacatcataaaagcgaaagcaaaggccgtgattaatcatgtgcgggttgaggatgacggaacgacctgcctttcgtataccatccattacgaatacgtgtgtaaggaacaagatgacagcttgtatatagaagagcacatagaggagcgaatggctttcctgtatgatcacattttgattagtgatcaggaaattgcgaaaaagccggctggatttcatgaagggaccagtattattgactattctgaagctgaagaggaaagagaagcgtttggcagggcttttcaatacgatcgtctcggcgctgtccaatatgccgagaaattttggaacaagcgcaatcctgcttataaaaatttcagcgataactgtacaaattttatttctcagtgtcttcatgcaggaggcgcgccgatgcgcggtcatccgaacaggggatcaggctggtggatgaaacaaagctcatggagctacagctggacggtggcgcactctatgaaaatgtatttgtcgaattcaaaggccggactgcgtgcggtgcgggtgaaatcagcggaagaactgatgccgggcgatgtgatttgctatgacttcgaaggagacggccgctttaatcatacaacgattgtcgtggcaaaggacaaaggcaatatgccgcttgtcaacgcccagacctatgacagcaggatgaggtattggtcatatgaggattctacggcatacacgccgtcaatacgatatgccttttttcatatcgttgatgatacgacaaaagagtaattaatgttataatgatgggcggataagaaaaacagaggtgaacattgtggcattacatgtcgttttatatcaaccagaaattcccgctaacacagggaatattgcacgtacttgtgcagcaaccaatacaacgctacacctgattcgtccgctcggcttttcaacggatgataaaatgctgaagcgtgccggactcgattattgggagtttgttaacgttgtgtatcatgattcgttagaagaattgtttgaggcatatgaaaaaggccagtttttctttattacaaaattcggccagcagcctcatacatcatttgattacactgatcttgacgaggattatttcttcgtgttcggaagagaaacaagcggtttgccaaaggatttaattcaaaataatatggaccgctgcctgcgtcttccgatgacagagcatgtcagatcgttaaatctgtccaatactgccgcgattcttgtttatgaagcgctgcgccagcaaaattaccgtgatttaaaatagtgaaaaaacccgctcatcgatgatgggcgggtttttttgcggatgttgaaatgctttgtttcgtttttgggcttaacaacgtaacagtgttatgttacaatgtacccatcaaaggagctggacttatggaagaacaattaatctctaaaaaagaattacttgaaagaacatcgatttcatacggtcagctgtatcgatggaagcggaaaaacttaatacctgaggaatggtttattcgtaaatccacatttacagggcaagagacgttttttccgagagaggagattttaaaacgtatatcaatgattcaaaagatgaaagaaaatttgtctttggatgaaatgagggaaatgctgtcgccgaaaatgaaggatgtcagcatgaccgctgatgaattgcttcataaaggtttggtttcaaggcctgctcttgaagcctattcagaagacggaggaagtccggttttttcatccagcgatttgctttcgctatatgtgcttgagggactgctgcagtctggaaatgtcagccttgcagaagcaaaaatggctgcagaggtattaaagaagcatgataatgaagagattgaaaaacagacggagctgattgtgctccgcaagctcggtgtcacaacttgttttatagcggctgcggcggacagcattttgtttgaatcatccgtaaaggttgtggaacgggtagatttattaaaagcttcagaggaattaaaaacaacatttatgcaggagggccatcgatggatgtagtggaaaagctggtgataaacggatcaggaagttcaaagggaggaacatttcaatctgttgagattaatggcagcgggacagtggccggggacgtggagtgtgacactttttcttttaatggaaacggaaaagctgacggcagcgtcaaagcgaaagcggtaaccatcagcggttcaggaaagatacatggagacgttgaagcagaatctatccggatgaatggcacttgttttattcaaggagaggtatctgcaaaacaattgaaaatcgctggatcatcaacatttggcggcactgtcaaggctgatggcattgacattagcggaaaagctgtcatggaagcagattgtgaaacagaaacctttcaatcagaagggaaatgcaaaatcagcgggcttttaaatgcagaccaggtgatcattaagctttctgcaggggaaagctatgcgcgggagatcggctgccgccatcttcaagtgacctgcagaaaaggaatgctgacattgctcagattgatgccgcagcctgttctaacagcagagctgatcgaaggtgacgtgattgaattgacaaatacaaaggcgaaaaccgtgcgcggaaataaagtgatcatcggcccggattgccagattgaaaccgtcgaatacagcggggactatacctgtgatccaagcgcatcggttgaaacatccacaaagttgtaaggaggatcgtaatggagacaacaaaactgggaaatttaaaattatatggcgctgggcatgccgcaggaggcgcgtatcacaatgtcagcatcaaaggagaaggtgtagttggagaagggttgtctgctgtaggctgccgcatatacggaacgggcctttttctcggaaaagcagagactgagcggctgcgtgtgctcggagaaagtgaatgtaaaggcgatctgacagccggcaaaatcaatatatatgggataatgaaagtcagcggctcacttcaatttgatcgattcaatctgaaaggccagactgaaattggcgggaatatgactggagaatcctgcgatgtgaaagggaagcttagcgtaaaaggtgattgtgaaacagaaatgttccatgtcacaggctgtgttgatgtatcggggttattaaattcgggtgagatcaagctgggattgagccatgatataagccatgtgcaggaaatcggcggaacaacaattacagtgaaaagacgcgcgagtttttttaatcggaagaaagtgaagctgatcgccgatgtcatagaaggcgatcgggtttatttggagaataccgaagcggcagtcgtcaggggaaaagaagtgatcatcgggccgggatgcagtatcggaacaattgagtacgaaaacaaatatgaatgcgatccgcattcacagattaaagaaaaaacaaaactgtaaaacattgttctgttatacaaaaagggtgctctttcaggagcacccttttttattcttttccaggcttgctttcgtatcctgcggtaaaaattgatactaaaaaagtgacaatgacacccatcatgatgattgttttcaccgtctctccccctcttcaatttttccgtgctgtccgagtctggatgattctgtatttttctttattatgaacggtcgcagtctgccttgtcaacgatgtataagtatctttatttttaagaaaccaaagcatgtatcacgagatggcggcatagattgtatcaaagtaccttatttgcatagtgtatcaaacatgatagaggaggtccttatggatatattaaagaaaattgaacagtacagagaggaagagcagcggctgaaatgggaaggaactttcgccgattatttggagattattaaagaaaatccgatggtcgcgcaatctgctcattctcgagtttttaatatgataaaagacagcgggatagaggagattgacgggcgcaagaagtacagtttttttgaccgcgagctgttcgggcttgaagaatctctggagcgtcttgtggaagagtattttcatccggctgccaaacgtctagatgtcagaaagcggattctattgctgatggggcctgtgagcggcggtaaatccacgctggtcacaatgcttaaaaaaggtctcgaagcgtacacgctgacagataatggcgctgtatatgcgattaaaggctgcccgatgcacgaggaccctctacatttaatcccccatcatttacgcgatgacttttacagggaatacggcattagaatagaaggaagtctttctcctttaaatgtcatgaggctggaggaagagtacggaggaagaattgaggatgtgaaggtggagcgtatcttcttttcagaagataagcgtacgggaattggaacattcagtccctctgatccgaaatctcaggatattgccgatttgacggggagtattgatttctcaacaatcgccgagtacggttcagaatcagatccgcgtgcttatcggtttgacggagagctgaataaagcgaaccgcgggatgatggagtttcaggagatgctgaaatgtgatgagaaatttctctggcatttgctttccttgacacaggaagggaattttaaagctgggcggtttgcgttaatttctgctgatgagctgatcgtggctcacacgaatgaaacggagtttcgctcatttatttctaataagaagaatgaagccctgcactcaagaatcatcgtgatgccggttccttataatttaaaagtgtctgaggaagagagaatttatgaaaaaatgattgcagaaagcgatgtggcggatgttcatattgccccgcatacgttgaaggtcgccgcgatgttctcaatccttacccggttaaaagagccgaagcggtcggatattgatctggtcaagaaaatgagactgtatgatggggaaagtgtggaaggatataactctgtcgacgttgaggatatgaaaaaagaatataatgatgaaggcatgagcggaattgatccgcggtacgtgatcaaccggatttcttcaacgattatcagaaaaaatatggaatcgattaattctctcgatgtccttcgctccttaaaagaaggtcttgatcagcacccatcaatttcaagcgaggacagggagcggtatttgaattttatttctgccgcccgcaaggaatatgacgatattgcgaaaaaggaagttcaaaaagcgtttgtttattcatatgaagaatcagcaaaaacacttatggacaattacctcgataacgtagaggcctattgcaataaaaacaagcttcgtgatcctttgacaggagaggaaatgaaccctgacgaaaagctgatgagatccatcgaagagcagatcggcatttcggaaaacgccaaaaaagcgttccgcgaagaaattttaatccgcatctcggcctatgcgagaaaaggcaagcggtttgattacaattcccatgaaagactgcgtgaagctattcagaaaaagctgtttgctgatctgaaggatgtcgttaaaattacgacctcaacaaaaacgccggatgagcagcagctgaaaaaggtaaatgaagtcgtggcccgtttaattgatgagcacggctacaactcgacgagcgccaatgagctgctgaaatatgtcggcagcctgctgaaccgataagcaacgtgacccgtccgaatagggcgggttattttgtcccattttctaaatagtttgtcaattaaacgtgcatatgtgcatatgatgaatataaatcttttcaaaagacttgtttcataatctggcacaagccggaatacgtatgtatcacgaccacaaatggttaaggaggggaattcatgtcccaaaatgacagcggccattttttgatttctgaggaaaactggtccctccatcgcaaaggcttcgatgaccagcaacgccaccagaaaaaagtgcaggaagcgatcaaaaacaatcttccggacctcgtaactgaggaaagcattattatgtctaatggaaaagatgtagtgaagatcccaatccgttcacttgatgagtataaaatccgttataactatgataaaaataaacatgtagggcaaggagacggcgagagccaggttggagatgttgtggcccgggatggatcagacaaaaaacaagggcctggaaaagggcagggtgccggtgatcaggcaggcgaggattattatgaagcggaagtttcattaatggatttagaagaagcgctttttaaagaattagagcttccgaatctccagcaaaaagagcgggacaatatcattcatacagatatcgagtttaatgatatccgtaaaacagggttaaccggtaatattgataagaaaagaacgatgatgtcagcctttaaacgaaacgcaatgtcaggaaaaccgtcgttctacccaatttatccggaggacctgaaatataagacgtggaatgacatcacaaagcccgaatcaaaagccgtcgttttagccatgatggatacaagcggcagtatgggggtttgggaaaaatacatggccagatgcttctttttctggatgacccgttttttgcggacaaaatacgagactgtggaaattgaatttattgcccatcatacagaagcaagagtggtctcggaggaagattttttctcaaagggagaaagcggcggaacaatttgttcttccgtatatcggaagtcgcttgagcttattgatgaaaagtacaatcccgcccgctataacatttacccgtttcatttttctgacggtgacaacctgacatctgataacgcgcgctgtgtgaagctggtcaatgatattatgaagaaggccaatctgttttgctacggcgaggtcaatcagtacaacaggcattcaacgttaatgtctgcatataaaaatgtaaaagatgagaaatttaagtactatattttaaaacagaaatctgatgtttttcaggctctaaagaactttttcagaaatgaagagtctggtgtaagccatcaattttcgtaatgaaaagcccatttcagggcttttttttatttaataaaagcaagaaaacgcttgcgaaaaaaatacgggagaaaaagaaatttttcctttgacaaatcttctttcatttattaatattttatcttgtgaactattattgaggaatgaggtgaaaaggagttgactgaatcagaacgtgctttgctcacttttgaacagctcttcgatacgtctcgggcgatatataaaaaacagaagaagatattggagattgtgcttgagccttttgatattacagtccttcaatatttgctgatgtttaaaattcatcaaagcggaagcaccccgctaagcaagctggcaatgtcgcttgatcttaagcctgcttctgtgacgcggatgacagatattctgtataagcgccaattgatgaatcgatatgacagtccggatgaccgccgtatcgtcatgattcagttaaccgaagagggggaagaactgatagaaaaagccgctgtgcaatatgcaaaaatgggtgctggcttgtaccaaaagcttgatacctcccagctgcagtatttgcgcaaactagccggaagcttaacgaagcttgctgaaggctgttcagaaaaaagcggtaattaaaaacttctcacatattttcaccagctttccgcaaaatgatagaggatgaaacgaaaggagaaaacaaaatgaacagaggacgtttaattctgaccaacattatcggtttgattgttgttcttgcaattatagctggaggtgcttactactattatcaaagcacaaactacgtaaaaacagatgaagcaaaagtagcgggcgatatggctgctattactgctccagcggcaggtaaagtatctgactgggatctggacgaaggaaaaacagtgaaaaaaggcgacacagttgcaaaaatcaaaggcgaacaaactgttgacgtaaaatccattatggatggaacaattgtgaaaaacgaagtgaaaaacggacaaaccgtacaagctggtacaacaattgcacaaacgattgacatggacaacctatacatcacagcaaatattaaagaaacagatattgcggatattgaagtaggaaatagtgtagacgtagtagttgacggagaccctgatacaacatttgacggtactgtagaagaaattggctatgcgactaactcaacttttgatatgcttccatctacaaattcaagcggaaactacacaaaagtaacacaaaaaattcctgtgaaaatttcaatcaaaaacccatctgataaggtgcttcctggaatgaatgcatctgttaaaatttctgagtaaaacagatcagtcatcaaaccatgaaaggaggttgtcttagatggctacaggcaaagaaaaaaatgcaaaaaaccctatgtcattgctgattgtgctaatggcgggtttatttttggcaatcctaaaccaaacactgcttaatgttgcaatgccgcacttaatgactgaatttggcgtaagtgcaacgacgattcagtggcttacaacaggttacatgcttgttaacggtgtattgattccgttatctgctttcctgattacacgatttggccaacggagtctctttctcgtcgcgatgttttgttttacgctcggtacgttagtctgcggtatcgcacctaacttctctacaatgctgatcggccgtttgattcaggccgtgggcggaggtatcttgcagccgctcgttatgacaaccattctgttaattttcccgcctgaaagcagggggaaaggaatggggattttcgggctagcgatgatgtttgctccagcggtcggcccgactctttccgggtggattattgagcattatacatggcgcattatgttttacggtcttgtgccgatcggcgcaattgttatcattgtggctttcttcatctttaaaaatatggtggagccgcaaaaaatcaaactcgatactcttggcgcaatcctatcgattgtcggattcgcctccttattatacggagtcagtgaagccgggtctgacggctggaccgacccgattgtattgtctacagttattatcggagccattgcaattgttgcttttgttgttcagcaattgcgtcatgatgatccgatgcttgatttcagagtgtttaaatatgacattttctcactctcgagtgtcattaatatcattataacagtggcactttacactggtatgttccttttaccgatctatctgcaaaacctggtcggctttacggcgcttcaatccggtctgcttctgcttccgggtgcgatcgttatgctgattatgtcaccgatctcaggtattttgttcgataaattcggaccgagaccgcttgcgattatcgggcttctcgtgacagtggtaacaacatatcaatacacgcaattgacaattgatacaccatatacacacatcatgctgatctattcaattcgtgcatttggtatgtctctcttaatgatgccagtcatgacagccgggatgaaccagcttcctgcccgtctgaacagccacggaacggcgatgagcaacacgcttcgccaaatcagcggatcaatcggaacaagtttaattacgacgatttatacaaaccggacgacattccattattcacaaattgcagataaaacaagcacggcggacccgaacttcctccatgcgttccaaaatgcagtttcgaatttaatggtgaatatgaatgtgtcttatgatacggcgaaaacatatgtgtactcacatatttataaacacgcgtcactcgattccaatgtcatggggataaatgatgcctttatgtgggcaaccttattctgtgtagcaggtttgattttaagtatcttcctgcgtgacgtcagaaaagataaattgcgtaagaagaaaaaagaggagctttcattacttcctgctccaaaagaagctaaggaatcttaatctgtacagggaggtttcctgaatgaaaatttatgtagtgtatgatagtgaaggcgaacatactaaagtgcttgcagaagcgattgctgaaggcgcgagagaaaacgacgcggctgaagtgttcatcgaccatgtagatcaggctgatatccgcaagcttaaagatatggatgcgattatttggggatgcccagggcatttcggaacaatcagctccggtcttaaaacttggatcgacagacttggctacttgtgggctgaaggcgagctgatcaacaaagtcggtgctgtcttctgcacaacggcaacaacacacggcggcttggaaatgacaatgcacaatttaatcacgccgatgttccaccaaggcatgattgttgtcggactgcctggcaacgtgcctgaaaacgcactttatggctcttattacggagcaggtgtcacttgtccggtagacagtgatgagttaatgtctgaggaaggtattcagcttggacgcgcgttgggaagacgtgtcagccaagtcacaggaaacctaacagcaggacagtaaggagaggttgaaatggccattattatagcaataattgctgctgtcattgtcattgcggcccttattacatttaacgtccgcaacgcctcacctggacctgagaagcaagaagcaaccgatagaatcgcacctccagaagagggaaaaaacgaagcgcattaccctgctgaagcaagggctgccgagcatacgccatccgttgtcaaaaacgattctccaaaagagaagcgtgacacaatgggtgatgatatttacaggcaggcgctgcaaaagtttaagcattctgatgaagttcatgcagaagaagaggtcactgaggaaagtgacaaaatgcaggaccgcagctatcgtgatgcgctgctctctatgaaaaataagaaaaagtaatgaaaaaggcaaatccgttttctcatgcgggtttgccttttttgctgtttccatcaattcggtttttatcaaataaatccatggaatatgttgtattccatcttgatctagtgtactatgttactcatacaccgagggttttttctgggaggtaaagacatgaattcttttttaggtttattaaagaaagatatcaagctttcaagaatgtggctgctagtatggatatgcggaatcattttcttattgggaacaggccatattatagcttctcgcacgaaagaacctctagtcatttttggtttttttgttgcagttgctttttttctgcttttcttatctcctgtttttgtgttttatcaccttcgcaaggaagggaaatcacagctttggctgtacaatccaaatggcggcttctggctgttttcttctaaattggcagcatctttgctctatcaatttgtgattcagttggcattaacagcctatggcatatggatgtatcatatgctctctgtaaaaaatctgctggagcatcaagttgatataacgagtacagtggctttgctgaatatgtatgggcttatttcttcgttagatatgtcagtaacagtcattgtgttttggactgtttttcactctctcagaaattggcgcagaatgcggtgggctgcgatggttctgttggttgcagtgtggttattcttcgatgaatacatcataagccctttggttgaatctcaaaagcatttctggcctgtaacagtctattgcaattttgatttccacttctacaatgtttggagattggaattaaaacctatccatctgtctgtgctagggtttcctattactttagtcatcacattcttgctgctcattatggcttcaaaactgcttgatcgtaaagtagaggtgtaaatatggacaatcaattccaatcctcgaaaccgatttatctgcagatcgctgatcagatcttttataggctggtcaggaaggagctgctcccaggagacaagcttccttcagtaagagaaatggcgattcaaactaaggtaaatcccaatacaattcaaagaacttacagtgagatggaaaggctgggtattgtggagacaagaagaggtcaagggacgtttattgcggaaaaagcagaaatcgtagacgagctgaaagacaagctgacacgagaggtgctggaaggctttgtcaagcaaatgaaagagctggggctaacgaaagaggaaatggtagaagggattaaaacattcacagagggaggctaaaatgggaatcaagctagaacatgtatcaaaaaaatacggccgccatacggccgtcaatgatgtgtcaatcaccctatcatccggacggatttatggcctgatcggaccgaacggcagcggcaagtcaacgaccctgaaaatgatggctggccttctgtttccgacttcaggatttgtgaaagttgatgaagagcaggttacgagagaaatggtgcgtcaaacggcttatcttactgagcttgatatgttttatccgcatttcactgttaaagatatggtgaatttttatcagtcgcagtttcctgattttcaaacagaacaggcttataagctattgaatgagatgcagctgaatccggaaaaaaagatcaaaaagctatcaaaaggaaatcggggccggctgaaaatcgttcttgctttagcgagacgggcagacgtcatcttgcttgatgaacctttttccgggcttgatccgatggtcagggattccatcgtaaacagccttgtgtcgtacattgattttgagcagcagattgtcgtgatcgcgacacatgaaattgatgaaattgagactttgttagacgaagtaatcatcctcgccaatggagaaaaagttgcgcagcgtgaagtagaagatattcgtgaacaggaaggcatgtctgttttgcaatggtttaaatcaaaaatggaagtttgctagaaagaggaggaatatgatgaaaacagtgttggaattgaaaaacgtgactaaaaacatcagaggccgaacgatcattgatgatctcagttttacgattcgtgaaggcgaggtattcggttttttgggaccaaacggagcggggaaaacgacaaccatccggatgatggtggggttaatgaagctgtcgaaaggtgatgtcctcatttgcggccaatcaattacgaaagaatatgccaaggcgattaagcatatcggagcgatcgttgagaatcccgagctgtataaatttttgagcggatataaaaatctccagcaatacgcaaggatggtcaagggtgtcacgaaggaaaaaattgatgaagttgttgaactggtcggtttaacagacagaatccacgacaaggtgaaaacatattctctggggatgagacagcgtcttggcttggcacaatgccttctgcacgatccaaaagtgctgattttggatgaaccgacaaacggccttgatccggcggggatcagagaaatcagagatcatttaaagaagctgacccgagaaagaggaatggctgtcatcgtttcaagccacctgctgtcagaaatggaactgatgtgtgatcgaattgcgattctgcaaaaaggaaagctgatcgatattcaaaatgtaaaagatgaaaacattgatgagaacgatacatatttcttccaggttgagcagccgaatgaagccgctgctgttttaaatcagtacgatttgctgagtaagacaaatggtgtagaaatcaaactggctaaagacgaagtccctgcggttattgaattgctggtgatgcagcaaatccgtatttatgaggtcaaggtcataacaaaatcattagaggaccgtttcttagaaatgacaggtgaaacaaaagaggaggttcagcatgcttaatttgatttataatgagtggctcaaaattttcagccgtgccggaacatgggtgatgatcggaattctggggctgacaatggttggatttgcatttttagcgaatcatttttctgctggtgaatcaaattcccattggaaacaagaacttcaagcacaaaacgccgaattaaagaaagaaatcaaagaagatccttcactgaaagatgggtataaagaaacaatcacactcaacgactatcgcatcgagcataatatccctagtgacacgggctatacggtatggtcttatgtaacggattcagcaaactttaccatccttaccggtctgtttactattatcatcgcggccggaattgtcgcgaacgaatttaattggggaacgattaagctattaatgattcggccgctcagccgttttcaaattttgatgtccaaatatattacagttctcctgtttgggctcctgttgctgttgattttatttatcggttctactttattagggttgatcttcttcgggacgggtggtgaaaccgccgcgaatattcatttaatctataaggatggccatgtcattgagcaaaacatgatggggcatttggccacaacgtatctttctgaatccgtctcagccttaatggtggcgacgatggcgtttatgctgtctgcagtattcagaaacagctcacttgcagtagggttttccatctttttattggttgccggtacgactgccactgcatttattgcagcgaagtttgactgggcaaagtatatattgtttgctaatgtcgacttgactcagtatgtggatggcacaccgttaataaaagggatgactatgacgttttctatcgtcatgctggcgatctactttatcatcttcttgttgcttgctttcggaatcttcatgaagcgggatattgcaaactaataaagaaagctgttttgcataagcaaaacagcttttttgtcaaaataaaaactgcaggtttgcacctgcagtttttcatatcaatttatgcttacgcttctttagtaacgttagcagcttgtggtccgcggtttccttcaacgatttcaaaagaaacagcttggccttcttctaaagttttgaagccttcgccttgaatagcagagaaatgaacgaatacatcgtcttgaccttctacttcgatgaatccgaaacctttttcagagttgaaccattttactttaccttctaacatgaaatttcctcctaaagcgatcataacgcttaaattcactattcttgctcttaacaaactttcaagacgaaaactcttacaaaactttcttcttaaagatagttcgaacaaaaataattacctttactctaccagtaatcttcagaaaaaacaactgcttattgaaacttttttcggaaaataccatatttatttttcaatttgatatttatttgcggaaattcatctgctttctcgatatgtgatcatacgtttgccttagtattccttcattttgggaagataagtaataggaattgacaaccttattggatatgagtaaggtaaaagttaatcaatattacaaatgacaacgtttatcaactaagagagcgtatgatttttatgtctgatattgcttgcatgctctaatacatagataggagtatggtcacaatgaaaaagtggcttatatgcagtttcgtccttgttcttctcgtttcatttactgcatgttcaccgtctgcagaacatgaatcgataaaaatcgggattgctgagtctgacggggcaatatggaactatattgctcaaaaggctgaagaggcagggctggatattcagctgatccctttttctgattatgcggagtctgatatcgcacttgctaacaaagaaattgatgccaacgcctttcaaaccatttcatattttcagtcgttcacccaaaaatacaaacttaatttgacgccgctcgggacgacatacataacgcccatgggcatttattcaaaacgatatgaccgaatccaagatataccgcgaggagctgtcgtttctgttccggataaagcgttcgattttggcagggcgcttacagtgctccaggaagcgggtttgctaacgctgaaaaacggatttaacggaacaggttcagttgatatgattaaagataatccgagacacctgaaattaaaagctgtccggcaacaggatgcagtgagcggtgccgacgtgtttgtcatgaaaccatcagaagcaaaaaaagcgggcctgaacccgaaaaagcatacgctaaagagcggcggactcatgtctgaggaagagatgaatttgattgttgtcagagcggaggatcaagatcgggaagcgctgcaaaccattcttgagctttatcaagcagatgatacagcggcatttatagaaaaagaatatcagagagatcttgtcccggcttttctgcctttgaaacgtctttcagattggaagaatgaattcgaacattgaattcattcttttttttctgaaaaacacactctgttccgtcccgtttctttcgctttgtaaagcatttgatcggcaagaatgggcaaggatcctggctgttccgtattattggggtaatgagcggcccctagtgatatcgtaactgaaagctcttcgccgtttgttaatacaatcggtgcatcacttacagtgctcctgatccgttcagcgatccgggctgctttatcaagagaacagttcggcaggagaacggcaaattcttcaccgccgatccgagcggcaggatcagtatttcggatgctctgcttcagacgtaaccccagctctttgagcacctgatctccttcatgatggccatattggtcattgatggtcttaaaatgatcgatatccatataaatcagtgcaaattgaaaatgcggggtatcggccgcctgctgatacagagcttttgtggtttcttcaaactttcttcggttatacacgcctgttaaaaagtcaaagtgcgcctgaaacttatattgtttaaaaagaagatgtgcatttgtttcatgatcaataatatataaactgagcatgccgcccgctattgatatgatccaaaaatacaaatgaagttcgtatgaatgtaaatctataagaaaataaaaggaaaaggagatcaagctatttgtgattattaaaagatagaaagcatgttttagttgaactttttttcttctagaaacaatgagtgacgggatggcagcgatacaaatgataataaccgagtatagtgcagatgtgttcattgtaatcagcaagcggcctgcagtgatcatggccagggccgttgccgttgaaacccagcctccataaagagcggcaatcataatagggatatttcgaagatcaataattgaatgctgataggtaaatccaaaaaccatcagaataaccccgagcaaaccgcaggccagtcctttaacagcttgaaaggatatgctgtcttttttatgtactagcctttctttaaacaggtgggtgaagagataattaaatgtgattaaaatggtcaaatttacaaacagttctttcagcaaatattatcacccttatataaggtactaaagatggaagggaaagaaaagaaaaaaaaaggcattatataaggtttttttacttgaattgataagttaaaataattctcacttgacccatcggaattagtgtaatatagtaaatgagaaaatttgaagggagagtttacctgctttggagactttactggttgtattacatgtatttattttatttttacttatcttagggctctttgttatgcagaaaaaacatgtttccttctctaaacgtgtatttactgcgctggggctgggaattgtattcggatttgcgcttcagctgatttacggcccgacttcaaatatagtcattcaaacagccgactggtttaatattgccgggggcggatatgtcaaattgcttcagatggttgtcatgccgctcgtctttatttcgattctcggcgcatttacaaagctgaagctgacaaaaaatcttgggaaaatcagcggtttgattatcgggattttagtagcaacaacagccgttgctgcagctgtcggtatcgcgtccgcgctttcatttgatctgcaggcgattcaggttgaccaaggaagtacagagctttcacgggggcaggagcttcagcagaaatcagaggatatgacagcgaaaacgctgccgcagcagattgttgaactgctgcctggaaacccgtttttagatttcacgggagctagaccgacttcaacaatcgctgtcgttatttttgccgctttccttggagtggcattcctcggcgtcaaacacaaacagccggaacaggcagaaacatttaaaaaactggttgatgccgtttatgccattgtcatgcgtgttgtcacactcattttgagactgacgccttatggggtgctggcaatcatgacaaaaacaattgccacgagtgatcttgacagcattttaaaactgggcatgttcgtgattgcttcatatgccgcgttaatcactatgtttatcattcatttgctgctgctgacgttcagcggcttgaatccgctgatttatttgaaaaaagcggtgcctgtacttgtatttgcatttacgtcaaggtctagcgcgggtgctttaccgctgaatattaaaacacagagaagcatgggtgtaccagaagggatcgcaaactttgccggttcgttcggtctttcgatcggccaaaatggatgtgccggcatttatcctgcgatgctggcgatgatgattgctccgactgtcggccaaaatccatttgacccggtgtttattatcactgttatcgcagtcgttgccatcagctccttcggggttgccggagtcggcggcggagcgacattcgcggcgcttcttgttttatcatcattaaacatgcctgtcgcgctcgccggtttgttaatctcaattgaaccgttaatcgacatggggcgtactgctttgaatgtcagcggaagcatgacatccggtcttattacaagtaaggtcacaaaagaaattgatcaaggggcatttcatgatcaatccagagtgattgaagctgaagaagcgtaacatatgaaaacgtgtaatccaagaggattacacgtttttttaacggccgggttctaaatcctccagcatttccatcatcgtgttgtcgtccatgacattcattgcgctttgttcaaaatgaatgggttcagcataatgcggctgtctttttttcgcggctgactcagtttgcctagtttgagactgtgtatgctgatgcagtggttgctgctgtccagcgtgctggtgctgacggccattttgccgctggctttgatgctgcgaacggtcctggttatcaccgctgcttccgctgcttccgctaaatgcttgtttgaccatgtttcctacattagaagcatcaaacgtgttattttctgaatttcgtctgttcatttgtcctgtgataaacccgctaattctttggcggatctgaggtgataatgcagcaataagcatagttgatcctatgatcaatgctgcggggctgattcctcttcgctggttgaacaacatgatccctcctttgcagtgtattcatattttccccctcgttagacaaattaaccgttatatttcccgggaaagcatttcctccagatttgcatgcataattaaagccagttagaaaaacctataagtaaagtgataaaggaggaattcacatgtttggaaaaaaacaagtccttgcgtctgtgcttcttatccctttgcttatgactggctgcggtgtggccgaccaaggtgagggcagacgtgataataatgatgtaagaaacgtaaattatcgaaatccggccaatgacgatatgcggaatgtaaacaatcgggataacgttgacaacaatgttaatgataatgtcaataacaatcgtgtaaatgacgataataacaacgaccgaaaacttgaggttgctgatgaagcagctgataaagtaacagacctaaaagaagtaaagcatgccgatatcattgtggctggaaatcaagcctacgttgcagtcgttttaaccaatggaaataaaggtgcagtagaaaacaatctgaagaaaaaaatagccaaaaaggtaagatctactgacaaaaacattgataatgtttacgtttcagctaatcctgattttgtagagcgtatgcaaggatatggaaaacgtattcaaaatggtgacccaatcgccggattatttgatgaatttacacaaactgtacagcgcgtattccctaacgctgaataaataaaaaaagccgcacaatttgtgcggctttttctttgcgttaatgacacactgcgaactcaggctgcatagagtaaaaataaaaaggtacaagacggaccggctcagggagggagacgtttgcgggatggcataggaaagcgtgcggcatccgctctattcctgtgcggagtccttgtgatgctggctgtaagctcagccatcgtatcaagcgcgatgtatatcctgtcttttccaggtcaggcatctggaataacaaaagaacaagtgacgaagcacatgaagaaagagtcattcaaacaggccgatatttattacacttctaaggaaaagtccttactgccattgacgaaagaaacgcttgaatatgcggtcagtattaatcagattatgattggatattcgaatcaaaagcctattgacattattttttttcctaatgaaaaacagatggaggcttactccggtttattggatgtagttggtttttattctgagcgggagcagttgattggactgttgcctgaagagaaaaagaaactgttagaaggggacgaggtagcggtttatttgtaccagagattgttgattcatgaatactcgcaccatgcgtttcatcagaaattgaaggagcttgagacggatcccgatgagtttccgttatggtttcatgaagggttaagcgagtggattgcgaactatgaattgctcatagatccgatcacgttttctgtcgtgccctttgaccgtttgcagactgatcgagactggcaggaagccagagccgaatatgacactgatgtctatttgcaaagcttttatatgatcgatgagctgaccggcaaatacgggaaagacattatttcagaaatgattaaggaaacagcaaaaaaaggggactttgaaaaagggtttaaatcagcaacaaaggaaagtcttgatcattttgaaaaggattttaagaagaaatttgaaaaaaacagtgcggcattggatagtatctatccaatgcctttgttattagtgaagtccttgctgacccattccgccttgtgtcggaggcatttgtccttgggcaggggcgaatgaatttctcagctgttccatatcctgcgcatcaagctgaggaacctggtaatagccgtgtttgttttggtatagaaaaatttcaaatgccatttcaacatactcctgaatttgcgcagacagtacgcgtcttacggccggatttgtcatttccagagacgccatcgtcagcatagaagcttgtgctttaatcgcgcaaagcatttgtcggctgatgatgctgtcatcaatatcattcatggattgaacaggttttttaggctgtgacggctgcatgccgtaaacagcctggttgtcctccttcatcatataagttgctgttttttgtgaaggttcgcttcctgttttgaagcattctgcagttatattgtattgagatgtaatgaattgatgttgacgatcaaggatgtttagtaattcttgatccttacagaattgtctcagcatcatatactgatcaagcacagtaagtgttccggaaagcacctcatgcatatcaaacatttcatgtccgccgtggtttttatgcggtttgccaggaatacctttgttcatttgggattgctgctgctgattgaactgatccaaaccgaattcctccttttttttcagatcaactgtattttgtgtcagtctgccgtgtattatgcagaagcctgaaaggaattatatgctgtctgtcgaaatgataagcagacaaaatcgttgtcattatgtgtatattaagggaggaaatatgatgaggcgtattctgcatattgtgttgatcacggcattgatgttcttaaatgtaatgtacacgttcgaagctgtaaaggcagctgaaccgcaacagcctatatcgattgagaaggcaatacagcaaaaagaaggacaggcgcttgtcgaaggatatgcagtcggccaggctgtttccccgcagcattataagctgacaagccctttctcaaatgattataatgtcgcgctggcagaccgtaaaaatgagacatcgcccgaacacatccttcctgtgcaaatcccctccgccttcagaagccaatttgggctgcaaaccaatccgcttcttcttgggaaaaagataacggttcaaggaaagcttgaaaattactttaacacgacaggacttaaaaacgttcagtcgatgaacgtaaccgatgacacgaaaactccgccggctgaacagccagtgaccataaatgaagcacggggaaggctgaatgaagaagtaacgataaaagggatcattacagctgatcaaaacgcaatcggaggcgggaagctgtcgacctttttgcaagatgaaaccggaggcattaacatttattcgccatcccctgaacaatttcccgaattaaaagagggtatggatgtcacggtgacagggaaaatcacgtcttaccaggggctgaaagaaatcgttccaagctcatcaggcatcaaaatcaaccagtcaaatcaatccctccccgccccaaacacttaacaatcaatgaacttattaacggcagcctaggtgatcagtatgaaggacgccttgtgaaactaactgcttttgtttccttaattccaagttctcctgccggcggcggttacaatgtaacaatgattgatgacgaccatcatgcaatgacgctccgggttatgaatgaaacaggggtgataaacgagcttgatgagggcaaatggtatgaatttaccggtgtgttaagcagataccaaacctttcaactgcttccgcgaaaatcggctgacctgaagctgcttgaagagcagcccgcacctccgtctgcggagggagaatatgaagggattgttgaccgggttgttgacggcgataccattcatctcaaatctccggtgcttggaacgacaaaaatccggtttgtaaatgtagatacacctgaaacatatcacacaccaaaaaatgacgcagatgaaaatcaattaagatttggcaaaaaagcatctgactatctaaaaacggttctgtccccaggtgataaaattactgtcaaggtcgggagtgaagccaaggacagctatggcagactgctcggacaagtcataaccgaatcaggatcaaacgtgaacttagagcttgtaaaaaacggctatgctccgacgtattttatttggccggttgacaatgaagaggattatcagcaatttcaggccgcagtagccgctgcaaaaaaagatcaaaaaggaatttggaatgaaaacgatcccctcatggaaatgccgtttgaattcagagccagagagcaagggaaaggcctgacaagatatgtggggactcgtcgaataaaacatatgtgcagccagctgactggaagaagatagctgtggaaaacagaattttcttcgcttcagcaagtgaagcggagagcgcgggatataaaaaaaggcaaacggcacctcaagaacatgtgccgcttagaattctcagcatgaatgatttgcatggcaaaatcgatcagcaatacgagcttgatcttgatggaaatggaattgcagacggcacgtttggacgcatggattatgccgccgcatatttaaaagaaaaaaaggctgaaaagaaaaactcgctgattgtgcacgcgggagatatgatcggcggaagttctccagtttcctctcttcttcaggatgaaccgactgtagaactgatggaggacatcggatttgatgtcggaaccgtgggaaaccacgaatttgatgaaggcacggatgaactgctgaggatcttaaacggcggtgatcatccgaaaggcacaagcggatataatggacagaactttccccttgtatgtgccaattgtaaaatgaaatcaactggagagccctttttgccggcttatgacatcataaatgtggagggcgtacccgttgcttttatcggggttgtcacacagtcggcagctggcatggttatgcctgaaggaataaaaaatatcgagtttacagatgaagcaacagcggtgaataaggcggccaaagagctgaggaaaaaaggcgtgaaggctatcgcggttctcgcacatatgtcagctgaacaaaacggcaacgccattaccggtgagtctgctgatcttgcaaacaaaacagattctgaaattgacgtgatttttgccgcgcataatcatcaggttgttaacggtgaagtgaatggaaaactgattgttcaagcgtttgaatatggaaaagcgataggtgtcgttgatgtagagatcgataaaacgacaaaagacattgtcaaaaagtccgcggaaatcgtatatgttgatcaaagtaaaatcgaaccggatgtcagcgcgtcagccattttaaagaaatacgaaacaattgcggaaccgattatcagcgaggtagtcggcgaagccgctgttgatatgggaggggggtattcaaatgacggcgatacacctcttggaaacctgattgcggatggtatgagagctgccatgaaaacggattttgctcttatgaatggcggcggcatacgtgaagcgctgaagaagggcccgattacgtggggagatctttacaatattcagccgtttggaaatgtgttaacgaagcttgagattaaaggaaaagatttaagagagattatcaatgctcaaatctcgccggtttttgggcctgactacagcatcagcgggtttacgtatacgtgggataaagaaaccggaaaagcagttgatatgaaaatggcagatggcaccgagatccagcccgatgccacatatacattgaccgtcaacaactttatggcgacggcgacaggagccaaatatcagccaatcggactgctgggaaaaaatccggtgacagggcctgaggatttggaagcgacagttgagtacgtgaagagttttgatgagccaattgcgtatacaaaagagggaagaattaagctcgctgaagccagtgatattgaagaccctgtaacagaagacccgattacggaagagcctggagatgatccggggacggagcatccaatgaaagaggttccagagcctgatgtggatttgcctgatataaaagaaactccgggaacagcaccggttcatcagcttccgccttcagccatttcgagattcaatgaaataccaatcaacaacacaaaaaccgctgatactgctaatagcatcagcacattgccgttacaaaccgagactgcggaaagcgggtctgatcatcagcttccggatacgtcagcgggctactataactttatggtaatcggtgcggcggtgacattgtcaggaacttatctatatgtcagaagaaaaaggagcgcctccagaacgtgaaaaaagttattccactattcatcattgctgccggcctagtgatcgcaggctatggaggctttaaattaatcgatacgaatatgaaaacggaacagacattaaaagaagcaaaactggcggctgaaaagccacaggaacttttggggacgaaaaatagcacagatcaagcaaagaacaaagcatcatttaagcctgagaccggccaagcgagcggcattttggaaataccgaaaatcaatgcagagcttccgatcgtggagggcaccgatgctgatgatttagaaaaaggtgtcgggcattacaaggacagctattatcctgatgaaaacggacaaattgtgctgtcggggcatcgggataccgtgtttcgccggacgggagagctggaaaagggggatcggctccgcattctcctgtcatatggagaattcacatatgaaattgtaaatacaaaaattgtcgataaggatgacacatctattatcacgctccagcatgaaaaggaagagctgattctgacgacctgctatccgttttcatacgtcggaaatgccccgaaacgctatattatatatggaaaacgagtgacttaaaaagccgaggcagtgcctgcggcttttcttcatgaaaaatatgtgcggcaaaggtttttcatatcagcagggaaaggggcttcagcaactatgagctcgtctgttatcgggtgaaccgcttgtactttattggcgtgcagtgcctgcctgtttagcagcttgctcccgcctccgtaaagcgagtctcctgtcaacggatggccgaggctcgccagatgaacacggatttggtgtgttctgcctgtttccagctctaattcaacgagcgacagccgttctttcgcattgctggccattaccttgaaatgagtgacggcagtttgcccgcctggtgaaacccggcgtcttgtcgggtgtgaccggtctctgccgattggtgaattaattgtcccttttttcgtccgtagcttaccttcagcgatggcggtatacgtacgcttcagcgtctttttctctaactgctggtctaagatggcgtgtgccaaacgatgcttggcaaaaacgatagcgccagatgtatcctgatcaagacgatggacgtggcgcaccttacatgtttcgccatttatctgataatgataagcgatcaaattagccagtgtgccggtttgcccatcctcattcggatgcgtcgcgatgccagcgggtttattgacgatgagcatatgattgtcctcatataaaatatcaagctcgccatactccggaatgaccgaagatgcttcactttcctgaagatcaatgaacacacggtctcccttttttacaatcatattgtttaagacggattcgtgattgacctttatctgttgatgggacatccagtcttgtatcactggtttagaagctttgagcgctgttttgagtacggaaaacagccattggccgtcctgtttttcattgatgaggatctcaagccctctgcctttttggttcatgttaaatggctccttttcgaagcggaaggctgctgtttctcataggaaacacttaccttagctttcgcgtttttttctgtgctattcttgagtaagacttaggatattcgatggcaagaaaggtgattgacgtgagaattgtgaacgcagcaactgcagaacaggagagctttatcaaggagctgtctatggagctgatccatgatgtatttcctctttatttctccgaactggacattcagcgctttaaaaagaaaggcgttctgtctttaaataaccattattaccaaggaacattaaaagaagcatttcaaattatggcttgtcttcaaatgatacatattatcctgaccaagccttcgccgcactctgatttgagtgatcaggcgatttttgaaaaaaacagcaagatgctgaatgattttgggatttattttccgtttgctttttctgactttcaaaagaagactaacaaagcctttttcggtcaaagaaggctgatataatcatgcggcaagggcttttctatttttagaaaagctcttttttgtatcagagaaatcatatcataaaacctttcctctaactccctttttaaacggctcgtgtctgaacatactaatgattgaaaggggtgctgacaatgagttcagttaaagatacaatgacaacgcaggtggcaaccgtttctccgaatcaaacgattcaggaagcggcttctctaatgaaacagcataacgtcggggcgatccccgttgtagagcaaggtgttttaaaaggaatgctgactgaccgtgacattgcattaagaactacagctcagggccgtgatggccagacacccgtttcagaagtgatgtcaacagaactcgtatcaggaaaccctaatatgagtctggaagacgcgtcgcagctgatggcccagcaccaaatccgccgccttcctattgtagatcaaaacaatctagtcgggatcgttgcgcttggagacctggcagtcaatcagatgtcgaacgagtctgcgggatcagcgctgacaaacatttctcaccaaaacattcattaataagaaagagcttgcagtgtgcaggctctttcttcacataaaaccttactttttgaaagcagacttgtttcggggtatagtgagtgtatacatatgtctcaattcgtactaaaggagttgtacccagtgattaaagcgttaatttttgattttgacgggcttattctagatacagaaacacacgaatatgaagttcttcaggaaatatttgaagagcacggctcagtgctgccgctatctgtctgggggaaggtcatcggaactgcagcgggtttccggccttttgactatttagaagagcagatcgggaaaaagctgaaccatgaagagctcacacaattgagaagagagcggtttgccaaacgcatggaatcagaaaaagcgagacctggtgtcgaagcgtatttgaatgcggcaaaggatttaggcttaaaaataggccttgcctccagctctgattataaatgggtgtccggccatttgaagcaaatcggcctgtttgatgattttgaagttattcaaacggctgatgatgtggaagaggtgaagccgaatcctgaactctatttattggcggcaaagaacctgggggtatcgccagcggaatgtctcgcgtttgaggattctgtcaatggttcgattgctgcgaaacgtgcaggcatgaagtgtgtcattgtcccgaataaagtaacgggcaccttgatgtttgaagactatgatcacaggcttgaatcaatggcggagatggagctcgccctattgcttgatcatctgaactcacaaaactagaaaggagcgagtaggttgtctgagaaattagatttgacccggtttgaaaagaaaatggttatccgcaatatcgaagagaaagacatcgacaagattatcgatcttcaaaaggactgctttccaggaatggagccttggaagcgggagcatttaatcagccatttggagcattttccagaagggcagttttgtgcagaattcgaaggtgaaattatcggttcgtgctcaagtctcctgattaactttgatgaatatgatgaccgtcatacatggcaggacattacagatgacggttatatcaccaaccataatcctgacggcttgaatatgtatggaattgaagtcatggtggacccgaagtacagacgaatgaagattggccaccgtttgtacgaggcgagaaaggacttagccagacgcttaaacctgaaaagcatcatcataggcggacggattccaaactatcacaaatatgcagaggaaatgacagcgagagagtatgttgaacaggtgacacgccaccaaatttacgatccggttctttcttttcagctgatgaacggctttacccttatgcgaattaacccgaactatctcccggatgatacagcttcgatcaagtatgcgacgctgatggaatggaataatgtggattatctaccgcagcagacaaaacgctattataaatcggcgttccctgttagaatttgtgtgattcaatacgaaatgaagaaaatttattcctttgaggaatttgcgaatcaagtagaatactatgtcgatgttgcttccgacgcaagatctgattttgcggtgttcccggaaattttcacaacccagctgatgtccttccttgaggaacggtcaccgagcttggcggtgcagagaattactgagtatacagaagattacatcagcctgtttactgacttggctgtgaagtataacgtcaacattatcggcggatctcatttcgtcgaagaggaaggcaagatctataatatcgcttacctgttcagacgggacggaacgatcgagaagcaatacaaactccatattacgccgaatgaacgcaaatggtgggggatcagcgcaggagaccaagttcgcgtgtttgatacggactgcgggaaaatcgcgatccagatctgttatgacattgaatttcctgagcttgcccggattgcggctgataaaggagccaaaatcatctttacgccattttgtacagaagaccgtcaaggctatctacgtgtcagatactgttcgcaggctagagcggttgaaaatcaaatttatacggttatctctggaacggtcggaaaccttccgcaaacggaaaacatggatatccaatacgcccagtcaggcatctttgccccgtctgattttgaattcgctcgtgacggcattgtcggcgaaacaaacccgaatattgaaatggtcgtcatcggcgatgttgacctggaaattctcagaagacagcgccaaaacggtacagtgcgccagctaaaagacagacggcgtgatatttatcatattcaatataaaaaataattcccaaaaaacccgcctgaattggcgggttttttaaaacaaaagcggaattgtttaggtgctatctttaaaataaaagtaggtataatggagtttctgtattttcgccatttcctatatcatacagaaatcggctaggcttccattgctattgcaatggctgtccaagttgtttcgagtgcgacctttatcagtacgatgctgagcattgccactttgcctgttttgctttggaagctgcatcctctttcttcttgagaaagaggatattttattatttacgcggtttattgactctgacccggtctggctttatattgaaggcagggaaatcatcaccaagacatcacataaagagaaggtctgtttcaattgaattggcattatagagaacgctaatgaaatggagatgatggggatggaaaacattcagcaaaataagggattaaagcaaaaagatgagcaatttgtgtggcatgccatgaagggagtgcatcaagcggacagcctgatagcccagaaggccgagggggcctgggtaaccgacacagacggacgccgctatttggatgcgatgtccggtttgtggtgcgtcaacattggttacggcagaaaggagcttgcggaggctgcctatgagcaactaaaggagctgccttactacccgttaacgcaaagtcacgcacccgcaattcaactggcggaaaagctgaatgaatggcttggcggcgattatgttatttttttttccaacagcggatcggaagcaaacgaaactgcttttaaaattgcccgccagtaccatctgcaaaacggcgaccacagccgttataaattcatctcaagatatcgggcataccacggcaatacattgggagcgctctcagctaccggacaggcgcagcggaaatataaatacgagcctttgagccaagggttcctgcatgcagctccgccagatatataccggaatcctgatgatgcagacacgcttgaaagcgcaaatgaaatcgaccgcatcatgacatgggaattaagcgaaacgattgccggggtcattatggagcccatcattacaggcggaggcatcctaatgccgccggacggatatatgaagaaggtggaggacatttgccggcgccacggagcccttttgatttgcgatgaagtgatctgcgggtttggacggacaggtgagccgttcgggtttatgcactacggtgtgaagcctgatatcattacgatggcaaagggaatcacaagcgcgtatctgccattgtcagcgactgctgtgaaacgggacattttcgaagcgtatcagggggaagctccttatgaccgtttccgccacgtgaacacgttcggcggaagcccggctgcctgtgctttggcgttgaaaaacctgcaaattatggaggacgaacagctgattcagcgatcccgtgatcttggagcaaagcttttaggtgagcttcaagctctgagagaacacccggcagtcggggatgttagaggaaaagggctgctgatcggaatcgaactcgtcaaagacaaattgactaaagagccggctgatgccgccaaagtaaaccaagtggttgcggcgtgcaaagaaaaagggctgatcatcggcaaaaacggcgatacagtcgccggctacaacaatgtcatccagcttgcgccgccattttgcctgacagaagaggacctttcctttatcgtgaaaacggtgaaagaaagctttcaaacgatataatataaaagtgaattattaaaggagcacatgatgagttttcacaaccagccgatcttaccggctattcgcaatatgaagcaatttgatgagtttttgaacagttcattctcttacggtgttattcttgatattcatctcggccagctgaagggcgtgatcaaagaagcgcaaaagcacggaaagaacatgatggtgcacgtcgatctcattcaagggattaagcatgacgaatacggtgcggaatttatatgtcaggatatcaagcccgctgggattatttccacaagatcgaatgtgattgccaaagcgaagcagaagaaaatttatgccattcagcgcctgtttttgcttgatacaagcgcgatggagaaaagcatggagtttatcggcaagcataagcctgacttcatcgaagtgcttcccggcatcgttccgtcactcattcaggaaataaaagagaaaacagggattcccatctttgccgggggtttcatccgtacggaagaggatgtagagcaggcattgaaagcgggggctgtagctgtcacaacatctaataccaaattgtggaaaaaatatgaaaactttttgacggaaagtgattgacaccgctttcatgcactgatacaattgcactaggttaatacattgtgatggagaactcggagaccacagcagctctttacggcaaatgtttatgcacccgtaaagcggtttgttgtggtttttttattctcttcttctctatcatgctttttaatcgtgactttaggaggaatgtgctatgacagcattttggggagaagtcatcggtacgatgctgcttatcatttttggtgcaggtgtttgtgcaggtgtcaatttaaagaaatcgctttcattccagtctggctggattgttgttgtatttggatggggattgggtgttgccatggcggcatacgcggttggcggcatcagcggtgcccatttgaatccggcgctaacgatagcgcttgcatttgtaggagattttccttggaaagaggttccggtttatattgcggcgcaaatgatcggagcgatcatcggtgcggtgattatttatctgcattacctcccgcactggaagtcaacggatgatcccgctgccaagctgggtgttttctcaacagggcccagcattccgcatacatttgcaaacgttttaagcgaagtgattgggacatttgtccttgtacttggaatcttggccattggggcaaatcaatttacagaaggacttaatcctttaatcgtcggtttcctcattgtagcaatcggtatttctctgggaggaaccaccggctatgctatcaatcctgcacgtgacttaggtccgcggatagcccacgcttttcttccgattccggggaagggctcatcaaactggaaatacgcatgggttccggtagtcggcccgattttaggcggatcattcggcggcgtattttacaacgctgcatttaaagggcacatcacaagcagcttctggattgtaagcgttatattggttgtggtattgttaggactctatgtttatacgaaatcacattctgctaaaacattatcaaattcaaaatatatttaatcaaaggggagacatcttatggaaacgtacattttatccttagatcaggggacgacaagttcaagagcgattctgtttaataaagaaggcaaaatcgttcactctgctcaaaaggaatttacacaatacttcccgcatcctggctgggttgagcataatgccaatgaaatttggggctctgtcctcgcggttatcgcctcagtcatctctgaatcaggaatcagcgcttctcaaattgccggcatcggcatcacgaaccagcgcgagacgacggttgtgtgggataaagatacaggaagtcctgtctataatgcaatcgtttggcagtccagacagacgtccggcatttgtgaggaacttcgtgaaaaaggatataatgataaattcagagaaaaaactgggcttttaatcgatccatacttctccggcacgaaggtgaagtggattttagacaatgtggaaggcgcaagagaaaaagcggaaaaaggcgagctgctgtttggaacgattgatacgtggctcatttggaaaatgtcaggcggaaaagcgcatgtgaccgattactccaatgcctcaagaacactgatgtttaatatttacgatttaaaatgggacgatgaactgctcgacattctaggcgtaccgaaatccatgctccctgaagtgaagccgtcctctcatgtgtatgcggagactgttgattatcacttcttcggaaaaaatatcccgattgctggagcggcaggcgaccagcagtccgcattgttcggccaggcatgctttgaagaaggcatggggaaaaacacatacggcacaggatgtttcatgctgatgaataccggggaaaaagcaattaagtccgaacatgggcttttgacaacaatcgcttggggcattgacggaaaagtgaactatgcgttagaaggaagcatttttgtcgcaggctctgccatccagtggcttagagacggattgagaatgttccaggactcttcgcttagcgaatcttatgcagagaaagtggattcaactgacggcgtatatgtcgttccggcctttgtcggactgggaacgccttactgggacagcgatgtgcgcggttcggttttcggcctgacaagagggacaacaaaagagcactttatccgtgcgacactggagtcattggcttatcagaccaaagatgtgcttgacgcaatggaagcagattcaaacatttcattaaagacgcttcgtgtagacggaggagctgtgaaaaacaatttcctaatgcagttccaaggagacctgttgaatgttcctgtggagcgcccggaaattaatgaaacgactgcacttggcgcggcttatttggcgggtatcgctgtgggattctggaaggaccgttctgaaatcgcgaaccagtggaatctggataaacggtttgagcctgaattagaagaagaaaaacgaaatgagctgtataaaggctggcaaaaagccgtgaaagcagctatggcttttaaataaagtaatactatggtataatggttacaagttaataagaacggtcctgagatgaggagagaccacagcaccaaagtgtaagcatgcactttggctgttgtggtctctttttctatttaccgtgacaacaaggaggagacgtaatgatgaaacatcaattttcaagtcttgaaagagatcgcatgctgacagacatgacgaaaaaaacatatgacctatttattatcggaggaggaattacaggagccggaacagctcttgacgcggcatcaaggggaatgaaggtcgcactaagcgaaatgcaggactttgcggcgggaacatcaagccgatcaacgaagctggtacatggcggcttgcgctatttaaaacaatttgaagtgaaaatggtcgctgaggtaggaaaagagcgggcgattgtgtatgaaaacggcccgcatgtcactacaccggaatggatgctgcttccgtttcataaaggcggcacattcggttcatttacaacatcaatcgggttaagggtttatgacttccttgcaggtgtgaaaaagtcagaacgaagaagcatgctttcagcaaaagaaacgctgcaaaaagaacctttggtaaaaaaagacggcttaaaaggcggcgggtactatgtggaataccgcactgacgatgcgagactgaccatcgaagtcatgaaggaagcggtgaaattcggggcagagcctgtgaattactccaaagtgaaggagcttctttacgaaaaaggcaaagccgtcggcgtattaattgaagatgtgctgacaaagaaagaatataaagtgtatgcgaaaaaaattgtcaatgctacaggcccttgggtcgatcagctcagagaaaaagaccattcgaaaaacggaaagcacttgcagcatacaaaaggcattcaccttgtatttgaccagtctgtctttccgctgaaacaggctgtatatttcgatacacctgatggccggatggtatttgcgattcctcgtgaaggcaaaacatacgtgggaacaacagacactgtttacaaagaggcgctggagcatccgcggatgacaacggaggatcgtgattatgtcatcaaatcaatcaattacatgttcccggaactgaatatcactgcgaatgacatcgaatccagctgggcggggctgcgtccgctgattcatgaagaaggcaaagatccttctgaaatttcacggaaagacgagatttggacatctgactcaggcctgatcaccattgccggcggaaaactgactggatacagaaaaatggcggagcacatcgttgatcttgtccgtgatcgcttaaaagaagagggcgaaaaggattttggaccatgtaaaacgaaaaacatgccaatctctggcgggcacgtcggcggttcgaaaaatcttatgtccttcgttaccgcgaaaacaaaagaaggaattgcagccggtttatcagaaaaagacgcaaaacagctggcgatcagatacggctctaacgtagatcgcgtctttgaccgggtagaagcgctgaaagatgaggccgcgaaacgcaacattccggttcatattcttgctgaggcagaatacagtatagaagaagagatgactgcaactcctgctgacttctttgtccgcagaacgggacgtttattttttgatatcaattgggtaagaacatataaagatgccgttattgattttatgagcgagcgattccaatgggatgagcaggcgaaaaacaaacatacagaaaacctcaacaagcttttacacgatgcggtcgtaccgcttgagcaataaatcataacgggctgtctgcagcccgttatttctttttacgtggaaagggccagatctcaggttatcaagtgacagaggcacccgcttcatataaaataatggcataagctgatacataggaggacgaatatgacttggagaaagagctatgaacgctggaaacagacagaacatttagatccggaattaaaagagcgccttattgaattagagggagatgaacaggcccttgaggactgtttctataaagaccttgaattcggtaccggcggaatgcgcggggaaatcggcgccgggacaaatcggatgaatatttacactgtgcgcaaagcatcggccgggtttgcggcatacatctcgaagcaaggtgaggaagcgaaaaaacggggcgttgtcattgcttatgattcccgccataaatctccggagttcgcgatggaagcggcaaaaacacttgcgacacaaggcatccaaacatacgtgtttgatgagcttcgcccgacgccagagctgtcattcgctgtcagacagctgaacgcttatgggggaattgtagtaacggcaagccataacccgcctgaatataacggctacaaagtatacggggatgatggcggccagctgcctccaaaggaagcggacatcgtcattgagcaggtaaacgcgattgaaaatgagctgacgatcacagtggacgaagaaaataagttaaaagaaaaaggcttaatcaaaatcatcggtgaagatattgataaagtttatacagaaaaactgacgtccatttctgtacatcctgaattatcggaagaagtagatgtaaaggttgttttcacaccgctgcatggaactgcaaataaaccggtcagacgcggacttgaagcactcggctacaaaaatgtaacggttgtcaaagaacaggaactgccggattcaaacttctccactgttacatcgccaaacccggaagagcatgcggcattcgaatatgccattaagcttggggaggagcagaatgcagatattctcatcgcgacagatcctgatgctgaccgcctcggcatcgcggtgaaaaacgatcaaggcaaatatacagtgctgacaggaaaccaaaccggagcgctgctgcttcattacctgctttctgaaaagaaaaaacaaggcatcctgcctgataacggtgttgttctcaaaacgatcgtcacaagcgaaatcggccgtgctgtagcttcttcattcggccttgatacgattgatacgctgacaggctttaagtttatcggtgaaaagattaaggaatacgaggcatcaggccagtataccttccaattcggttatgaagagagctacggttatttaatcggggattttgcccgcgataaggacgccattcaggctgcgcttttggcagttgaagtttgcgcgttctataaaaaacagggaatgtctttgtatgaggcgctcatcaatctctttaacgagtatggtttttatcgtgaagggctgaaatccctgacgctgaaaggcaaacaaggagcagagcaaattgaagcgattcttgcttccttcagacaaaatccgccgcagaaaatggcggacaaacaggttgtcacagcagaagattacgcagtaagcaaacggacgcttctgactgaaagcaaagaagaagccatcgacttgccaaaatcaaatgtattgaaatacttcctggaagacgggtcttggttctgtcttcgtccttcaggaactgagccgaaggtgaaattttatttcgccgtaaaagggtcatctttggaagacagtgaacagcgtcttgcctccctttctgaagatgtaatgaagacggtggatgaaattgttgagtcaacagcaaaataattcaagtatgagctgggtcattgtaaatgatccggctttttctttttctcatccaaaagtctgaaagaaaatcatcctacaagtgaagcaatgaaatacaaaaaactggtataatcttaaatacaagatcaatgccggagtgagaaacgtgagcaaaacgaggatggaaaaattaaaaacgctgaaaacgattgcggaaaccttaaatcaagggcacgatatcaaagcaacactggatgaggttttaaaagagttgctgagtctgacaaatcttcaatccggatggatttttctgatcgaagaagatggatcttatacgttagcggccgacgctaatctgcccccggctttaagccgcaaggaaaaagtgctgatgtgcgaaggggagtgttactgcctgacgaaattcaataacggagggcttagaaaggctgcaaatatcatgaactgcaaacgcatcgaatcagcagaaaacctgcattgttttgacacagaagggattacgcatcatgcaactgtgcctttagaagacggggacagaagattcggattgttaaatgtagcggcggccggaaaaaccatgtttgatgaggaagagctgcatttactcgagtctgtcgcctttcagatcggaacggcaatccagcgtatgaggctttctgaatatcaacaaaaaaatgctcttttaatggagcgtaaccgcctcgctcaggagcttcacgattcagtcaatcaaatgctgttttccgtcagtttaactgccaaagctgcgaagacactaacaaaagatgagaatttacagcagatgattgaattcatccaaaacctatcacaggacgcgctcgcagaaatgaaagcgttaatttggcagcttcgccccggaggattggaaaaagggctggctgaagccattaaaagctatggtgcactcattggattgaagatcatttttacacaaaaaggctgtcctgttctgactgatgagcatgagcatatgctatggcgtgtcgtacaggaagctttaaataactgcaaaaagcatgccggaacggatacggcgtatgttagtctgactgcttctttgtgccatgcggagctggatatcatcgatcatggggcaggatttcgctatgaagcgcataccggtctgccttcacttggcatcaagggtatgaaagaacgagcggaaaaagccggagctaagttttggattgagtcagcgcttggaactggaacaaagctgtccatcaggcttccgctaacaagccgaaaaggaggggcggtatgaaaattgtcattgctgatgatcatcatgttgtcagaaagggtctgcgttttttctttgccacccaggatgatattgaagttgtcggagaagctgcaactggaatagaagctctccgtgtcatcgaagagacaaagccggatcttgtgctaatggatctgtctatgcccgagatggacggcattcaagccattaaaaaagcaatacagcaatttccggagacgaatatcattgtgctgacgagctactctgatcaggagcacgtcatccccgcgcttcaggcaggcgcgaaggcgtatcaattaaaggatacggagcccgaggaattggtgaaaacactaagacaagtgcatgctggcgaatacaagctttctacagctattatgtcccatgtgctgacacatatgaaaaatcagcacgacccggaaaaagaaaaatactatcaattaacaagaagggaaaaagacgttctgactgaaatagcgaacgggaaaagcaataaagaaatcgcagcatccttgtttatttcagaaaaaacagtaaaaacccatgtatcgaatcttttagcaaaacttgaagtggccgatcgcacgcaagcagcgcttttcgcagtgaaatataacctgaatggagagatcttaaaatgaacatgttagtcataaatggcacgcctagaaaacatggcagaacaagaattgcagcttcctatattgcagctctgtatcacacggatttgattgatctaagcgagtttgtattgccggtttttaacggtgaagcggatcaatctgaactgttgaaggtacaggagcttaagcaacgcgttacgaaagcggatgcgattgtattattatcgcctgaatatcacagcggcatgagcggcgctttaaaaaatgccttggattttctaagcagcgaacaattcaaatataagcccgttgcattattggcagtagcgggaggcggaaaaggcggcatcaatgcgctgaacaatatgagaactgtgatgcggggtgtctacgccaatgtcattccgaagcagctggtgcttgatccggtgcatattgatgttgaaaatgctacagtggctgaaaacattaaggaaagcataaaagagcttgtcgaagaactcagcatgttcgcaaaagcaggaaatcccggcgtttaaacgccgggatttgtttatgtgagaagggctatttgatcttcataagtcagctctgtggcatgatcaatataacggagaagggaatacagcatcttttctaaaacggcgtaatcctgttcaaaatgatatgcatgcagaaaatgctcaattcgttttgataacaaatcgtcctctgtacgcaccattaaaattaataaattatcccattgagaacgatgggtgtaataaagcgctttatcgtaatcggcataatccatgaatcgcttctcctttcttgggtgagaagttcatgattagtttatgccgcatcctctgttattgacggggcaaaacttgccgtctgcgtaagtaaaggggtagcaatatgagggagacataaaatcaaaatgcctgaatgaagatatcgcttttggtaaacctatgagggaacatattctgggtacaggagactgaaaaaatgaaatccctgccgtataccatcgcgcttcttttttgcggattgattatcgtgtcaatggctgcaaaaggtcattcaacggacacagacgagtccgttcaaaagtgggaacagcttgcctggagcaaaattcaggatgaatataagggcgcttcattttctgattatgcttatatggggcgtacagaggtgaatgatcagcagacgaaagatgtctttcgggtgacagtcagacagaaagatgacactttttctgttcgggccgaagtctattttcatccggtgacaaatcatatgatcagcatcaacgtctttaggctctaataaaaaactgtacagccgttaaggccgcacagtttctgtttttagaaatatcgttttgcaccgagatagcgctgtttccagtaagagttgttcatattggaaatgacaactccggaatcgttggcatttatgaattccccgttgcctaggtaaattccgacgtgggaagggccggctttatatgttgtaaagaaaacaaaatctccgacagcaggctggctaactgatttcattgtgttccaatatcccgctgccgttaatctagatacggatgtgactttattcagtacatagtaaatgaatccgctgcagtcaaacccggacggtgtcgtgcctccccagcgatacggaaccccaagctgcgctttagcggccgaaatcattgtgttaatcttcgcactcgttgagctggtgttgtttgaagaaccggatgaagacgatgatgaagcttttccggaaatgaccagcttttggccaacctgcaagacatccgtttttaaattgtttttctcacgaatctgctgagctgttactttaaatttttgagcaatcacccacaaggaatcaccgcttttcactgtgtatgtagtcgtcgtgcctgagcttgcatttgacgaagaagacgacgatgatgaagagcctgaagatgctttacctgtcagcttcaatacttgtccaacgtacagcacatctgatttcagattgttgatatttcggatttgctgtacagacaggttatagttgtttgcgattttccaaagtgaatcaccgcttttaacggtatatttagttgttgctgaagtttggttcgatttggatgaagtgtctttagaagacgtatcagagccgcttgattttgttttcaacacctgattcacgtaaatggtgtctgattttaagttgttcaagaccttcaattcagcgatggacatattgactttgtttgcaattttccagagtgaatctccaagctgcaccttatatgttcccgtagaagatgaggaacttgaactcttattagaactgctttttgaactggagcttgaactcttattggaactgctttttgtactggaacttgaagaaacagtaccggacacctttaatttctgcccagcacgaattaaatcgctgcttagtccgtttaattttttcagttcctgcaccgtcattttaaactcatttgcgatcagccaaagtgaatctccgcttttcactgtgtaaacagaacttccgctcttcttggttgttgagcttgaagtagatgaagaagtgctggatttgctgcctggaatagtaagcgtctggccgatcgacagaacagtagtcgaaagatgattggcggatgtgagggccgccacacttgtgttataggtttgggccagtttccataaagaatctccgcttttgaccttaatcgttgctgcttcagctggtgtcactactaaagttgtgccgacaatcgcagatgctgtcagccctgctgctaatttctttttcatcttagctctcctttttcccccaatgattttgcatttgctgtttcttttttatatcggcacatttgtctcatcgttttgcctttttataaaaatagccaaattatcttaacaataagggggaaaaagggcataaaaaagaaggaatcttgatctattccttcatttttaaaagcttcatgatatcttctttgtttttgacgaggtcgcgcagtgtgtatttgtctaaaactgcgaggtaggccaaaagcgcttcattcagcacatgttttaagccgcaaaccggggaaataacacagagattcttattcgcatcaaaacattcaacaatattaaaatcgtcctccgtttttctgacaacctcaccgatgttgatgtcttcaggttccatgcctaatcgtatgccgccgccccgtccgcgtatcgtttctacgtagccgagctggccgagcctgtatatgactttcatgagatgattttttgaaatagaatacgtttcggcaatctgttttatatttgaaagttctccgggacgctctgcagccagaaaaatcaacactcttaatgaataatctgtataattggttaacttcataataagacctcagaataagacattttctatatcttatcataatcgattgaaaaatgaaaaaaaaggaattaaaaaaacatgcacccagctgggtgcatgttttttgcttacatgtcattcggcggattttggttttttcggtttttttcgatttctgtgttttgcattttgcgttcaaatgtagacagataacgtgatgcaaaatccttaccgccaaggccgaaggataaaccgaaagcgagtgcgaagccgctaagaacgatgatgaacgcggaattgacgattgtcgcagcgacaccaagctgatccagggccataaagaaagcaagtgcgataatcgtatatttagcaataggcgctaaagacttgaattcctggccttttatcatgcttgcgagcacttttctcaccaattctcctgcgtaaaggccgagtccgagaatgaatactgcgacaaggacattcggcagatacgcgatgatgccagtggcaatttctacgaggaagtgcagccgaacaatttgaagagcctcagctgtaaagagcagaatgacaatgatttgcgcaatcataccgacaacttgagacaaggacagctttgcaggcgttccggcttccatgcccattttccctaagacagaatcaaagcctgcgcgatggagcagtccggacaccatggatttcacccattttcctgcccagatacctgctaaaacaagcacgatggcaatcatgatgttcggaagcatgtttaaaatcgtattcagcatagagacagccggttttgaaatgccggagacatccagctgatcaagcgctgaaatgaccaccggaatcataatcagcacataagcgattgttccgatgactgctgaaaggcttgtatcttttaagtaaattgataaacccatacgtgccgcgaatctttccgtgccgatgcttgcaaggaaattcgtaatgatatcacgaacaaggcgggcaacaagccagccgattaatacgataagcgccgctgcaaataatttcggcagaaaagcgagcacgctttccatcatatttgtaaaaggacctgaaatgccgctgattttcaaagaagataagacccctggcagaaaaacaagcagcacgagataaaagacaatttgtgaagcggtattgacagcctggtgaatatcttttccttcagacaccaaattccacttgcgcagtttgtcactcgtgttcagcttcatcccgatttttttgacaaggaagctcaaaacagaggctgcagcccatcctaacagcagaatgagtccggctttcagcacgcttgggatcgcggctgcaatcgccgaaagcatactgacaaacggcgatgccactgttgtcaggtgcaaaatgttaaagaataaaataaagacgatgatcagtgcgataaaataaacgaccttgcttatgactttttccgaggaatagcgtgaaggctttttcccagcaaagagcttgtcgtcaatttttgttttgctgagtcctttgtataccgctttttcaatgattttagcaatagcccatccgattaataagacgagtaaagcaatgattacgtttggcagcttactgagataagaagaaagcacgtctgctacattcaattggtatcgctcctttttcgtagtatggtgtgtgtttacccactgatccaataagaaaacagatgaatgtgccgggggaattttttcttgcccgagtgagactatcatcttttgtctggcgggctcatacattatagataagtccaagtaggggggattcggttgaacgcggaggagaagaagggattacagcgggcaattgaggaaattaccgaaattgcaaaaggattcggccttgatttctacccgatgagatatgaaatctgcccggctgaaattatttatacatttggcgcgtacgggatgccgacaagattcagccactggagcttcggcaagcagtttcacaagatgaagctgcactatgatctagggttaagtaagatctatgagctggtcattaactcagatccatgctatgcttttttgctggacagcaactcactgatccaaaataaattgattgtcgcacacgttcttgcccattgcgatttcttcaaaaacaactgccgtttccaaaacacgaagcgcgatatggtggaaagcatggcggcaacagctgaacggataaaacactatgaacaggttcacgggataaaagaagtcgaatcttttttagatgcgatcctttcgattcaggagcatatcgatccgtcgttggtccgaccaaagctccaatggagtgtggatgatgaggaagaggagattgaagaggcagccacgccttacgatgatctatggtctttggatgaaaagaaaccgaaaaaacaagtgaaaaaatcgaaaaaaccgttcccgccgcggcctgaaaaagatatcctgctttttatcgaggagcattcccgggagctggagccatggcagcgtgatatattaacgatgatgagagaggaaatgctttatttctggcctcagctggaaaccaagattatgaatgagggctgggcttcctattggcaccagcgaattatacgtgagcttgatttaacctctgatgaagcgatcgagttcgccaagctgaatgcaggtgtcgttcagccgtccaaaacaggcattaatccttattatttagggctaaaaatatttgaagacattgaaaagaggtacaacaacccgacggaggaaatgaagaaaatgggcgtgcagcctgactccggccgggagaaaatgtttgaggtcagggagattgaatccgatatctctttcatccgcaattatttaaccaaagaattagtcatgcgcgaggatctttatttgtttcaaaaacagggccgagattataaaatcatcgataaacagtggaagtcggtgcgcgaccagctcgtaagcatgcgggtaaatggcggttttccatatttgacagtaaacgacggcgattatatgaaaaataacgagctctatattaagcattggtatgaaggaatagagttagatttgaaatatttggagaaagtgctcccttatttattccagctttggggaagaagcgtgcacattgagtctgtgcttgaggataaggaagtcatgttttcctacgacggaaaaggtgttcaccgcagatatttataaaaaagaggatgcagcgttctgcatcctttttattttccagtttttaaaatcttaaatatgatgtttgcctggtccgtattgttaatcaatccgcggaatttttcttttccggggccgtacgcgtataccggtacttcttcgccggtatgatcggtactcgtccatccgctgttggagcgagtattaaaaatcttgatgatggctttgtaggcccctttgcttttgtcagcctgtgcagctgcttcaacgcttttgatttcttcagatgtgaatttcagattggcatagcgggcgagcacatctttaaccggcttgccttcactgatttttttggccatgaattcaggtgttttcttagcggagagaatcggttctgcgtgccaattcttttccccgtttgcgccaatggtaaagccgccggttgtatggtcagcagttgcaatcacaagtgtatgtttgtcttttttcgcaaattcaatcgcggctttataggcctgttcaaaatctttaacctcgctcatagctcctactgtatcattgtcatgggccgcccagtcaatctggctcccttcgaccatcaagaaaaatccttttttattttggttcaggcgatcaattgctgaaacagtcatttctttgagagacggtgttttgctgtcacggtcgagcgccttagcaagccctccatctgcgaaaagcccgagcacctgctgatctttatttttcttcaatgcttgtttagttgtcacatagctgtagccggcttgtttgaattcctttgtcaagtttctgtccttgcggttaaaataagattttccgccgccaagcaaaacgtctattttatgtttgccttttattttgtcatccatatagctgttggcgatttcgtccatgtttttccgtgattcattgtgggcgccatatgcggctggagtggcgtggttaatttcagacgtggcgacaagccctgttgacttgccttgctgtttggcctcttcaagtactgatttcacttttttcccgtttttatcgacgccaattgcattgttatatgtcttaacgcctgtcgctaatgctgttccggctgctgctgaatctgtaatattatagtcagggtcatccggatgcgtcatcatcatgcctgtcaggttccggtcaaattctgttaacttcgggttattcggtgtgtcaccgttatttttcatggaacggtaggctcttatgtaaggcgtccccatgccatcgcctatcatcacaatgacatttctgatctcagctttgttttgttttttggcgctggccttttctgtttgctgcagctcagctccggcaaagattccagctgtaaggacagaaacagcggcgattggcagaaattttgatttcatattttgaaacaaattcattttttcatgcctcctttaatgtattccgtttatcacgttagggaaattttgttaaatgcggctgctgatcatgtaaacaataagtaaagccttgtaaggaaaatgaaaaaacgcttttcgttatcttgccttatttgatgtaaagcattcatttttcagaaaaatctttacctctctgtctttgcatgatatgtttgtttaaataaaaaaactgcggataaccgcagctctcctcgaatattctttatcactcatttttccggtatgtgagccgaccccgaaagtttttcatttatttcctttatgttgaaaaacatcccataaaacatgacaaaagcactcgttttttgtcacctttgcaacgaaaatgaaatatttaatacccttaaaaacttttttttagaacgaataattaagaaatttgtcacatgaagtcaagactatttctgatgggaatctatccttataatagaaatcaataagattaattaaaaaaagagatacatatatagagagttaacatttggggaggaaaatatgaaaaagcaaatcattacagctacgacagcagttgttttaggatcgacgttatttgcaggagcggcatctgcacaaagcattaaggtgaaaaaaggcgacacgttatgggatctttcaagaaaatacgacacaacgatcagtaaaattaaatcagagaaccaccttcgttcagacattatttatgtgggacaaactttatcgattaacggcaaatctacaagttcaaaaagcagcagttcttcttcctcttcttctacatacaaagtaaagagcggggacagcctttggaaaatttcaaaaaaatacggcatgacaatcaatgaactgaagaagctgaatggcttaaaatcagatttgcttcgtgttggacaagtcctgaaactgaaaggttcaactagttcaagcagctccagctcatcaaaagtgtcatcgtcttcaacttctacttataaagtgaagagcggagacagtctttctaaaattgcgagcaaatacggcactacggttagcaaattaaaaagcttaaacggcttaaaatcagatgtaatctatgtcaaccaagtattgaaggtgaaaggaacaagcacaagcagctcaaaacctgcttcatcttcatcatcttcaagcagcaaaacgtcatctacatcacttaatgtgagcaaactggtttctgatgcaaaagcgttagtcggaacgccatataaatggggcggaacgacaacttcaggctttgactgcagcggattcatttggtacgtactgaataaacaaacaagtgtgggcagaacaagcactgcaggatactggagttctatgaagagcattgccagcccgtctgttggtgatttcgtcttcttcacaacatataaatccggcccttctcacatggggatttacattggaaacaatagtttcattcatgcaggatctgacggcgtacaaatcagcagcctgaacaacagctactggaagcctcgttacctcggtgcgaaaagattctaatttttagagaaaacccgttcattggaacgggtttttttcattagacggagcacaggcgttttggttgctcctaaaaatgaaaatgtgataaaaaatccaagaattttttttctttcttattttcataaagggcaatcgcgtaagcgccagcatagggcagctgtacagactgataaggaattctgatcatctgtttctctgctaactcacgctttactgtagataaaggcagaaatgaaactccgagtccttccttgataaaccgtttcgttatatgtgtttgagtgaccttcattgttctcacaaatggaaatgtcattctgacttgacggagcaagtcgtcccagtaatcaggatgattatgggtcaaaagcaggtattgttcgagcacctctttggcatcaatttctttgtcttctatgaaacgcttatcgggcggggcaacaaggacgacagggtctttgtataagcagtggcagcttaaagaagaagactgtacctttaaacagcttagtccgatatctgcttccccggctttaatcagtgacgcgatttccgctgattcgaaaatcgtaaccgccatttctgtttccgtattcattgctgtgtaccgtttcatgacagaaggaagcacagtatctgcaataagcggagaaaccgcgagctgtaaggtttgagagtagccttgtctcactctgtgaagctctgccatgctgttttcataatcatcaagaagcctgagcgcatacggcaaatacgccctgccttcatcagtcagctggatttgcctgcctttacgctcgaacagcttgcagctgatttctttttctaattgcttgatatgtacggtcacagtaggctgagataagtaaagcgtttccgccgtttttcggaagttctcatattttgcagcggtcacaaaggtgtgaagccatttgaaatccatttctattctccctctgattaatatttttaattaattccctttaaaatattcattattttttaaatattatatttactataataacagaaaaggatagggggaattcaaatggtacattacggattaaagggaattacatgtgtggaaacatccatcagccatattgatggtgaaaaagggcgtctgatttacagaggacatcatgcaaaagacatcgcactgaatcacagctttgaagaagcggcttatttgattttatttggaaaactgccttcaactgaagaattgcaggtatttaaagataagctggctgcggaacggaatcttccggaacatattgagcgcttgattcaatcactgccaaacaacatggacgatatgtcggtgctgagaacggttgtttcagcattgggggaaaatacgtacacattccatccgaaaacagaggaagcaatccggctgattgctatcacgccttccatcattgcatacagaaaaagatggacgcgcggtgaacaagcaattgcaccttcttcccagtacggacatgtcgaaaactactattatatgctcacaggcgaacagccttcagaggcaaaaaagaaagcgcttgaaacctatatgattctggccatggagcacggcatgaacgcatcgactttttcggcacgagtcacgttatcaacagagagtgatttagtgtcagccgtcacggctgctctcggcacgatgaaaggtccgctgcacggaggcgctccttctgcggtgacaaaaatgcttgaagacattggagaaaaggaacatgctgaagcatatctgaaagaaaaactcgaaaaaggagagcgcttgatgggattcggccacagggtgtacaaaacaaaagacccgcgggcagaagctttgagacagaaagcagaagaggtggccggcaatgaccgtgatcttgatcttgcgctgcatgtagaagcagaagcgattcgtttgctagaaatctacaaaccgggacgaaagctgtacacaaatgttgaattttacgcggctgcagtgatgaaggccatcgattttgacgatgaattgtttactccgaccttttcagcaagccgaatggtagggtggtgcgcccatgtactggaacaggcagaaaacaacatgattttccgcccgtcagcgcaatataccggtgccattcccgaggaaattctttcataacatattttggcgtttattcatttctgtcgtgtggtaacgttcagtatcaaccacatgtctaggagtgatgaatggtgaacccaatggacagacaaacagaaggacaagaaccgcagcatcaggacagacagccgggcattgagtcaaaaatgaatccgctgccgctgtcagaggacgaggattatcgaggaagcggaaaactgaaaggaaaagttgcgatcattactggaggcgacagcggaatagggagagcagcagctattgcctttgctaaagagggggctgatatctccattctatacttagacgagcattcggacgcagaggaaacacgtaaacggatcgaaaaggagaatgtccgctgcctgcttatcccgggagatgttggggacgagaaccattgtgaacaagctgtgcagcaaacagtggaccattttggtaaactcgatatcttagtgaacaacgccgctgaacagcatccccaggacagcattctcaatatttcaacagaacagctggaaaaaacctttcgcacaaatattttttccatgtttcatatgacgaagaaagctttgcctcacctgcaagaggggagtgccattattaatacgacatcgattaccgcttatgaaggggatacggcgttaattgattattccagcacaaagggtgcgattgtttcctttacgcgttccatggcgaagtcgcttgcagataaaggcatcagagtgaatgcggtggcgcccggtccgatttggacaccgcttattccggcgacattccctgaggaaaaagtgaaacagcacggcttggataccccaatgggaagaccgggacagccggttgagcatgcaggcgcctatgttctgctggcgtctgacgaatcttcctatatgacagggcagaccattcatgtgaatggcggccgttttatttcaacgtgatcaacgaaaaaccagctctagagctggtttttttgtgtggtaaaaaatttcaaaataaaaaatttgtcgatttttctaacaattttgttttcatttttgcaattttatatataatattgagtaggagaaaggaatgattcgcgaccagtacaaatatagtagaaaaaaagaaaaatgaccattgttactcatgaattcagaaaattcaaataaaatatataaaaatagatgatcgggagttgaaggggaatgaaagggagcgtttttaggaagaaaagcattcaggatttaatcgctgcgacgagcggggaaaaatctttaaaaagagaattaggggcatttgatttaacgttgcttggaatcggcgccattattggcacagggatttttgttctgacgggaacaggcgcagtcacggcaggtcccgggctgacgatttcatttgttgtggcggcgttggcttgtttattcgccgccctgtcttacgcggaatttgcgtcaagtgtgcctgtttcaggttcggtgtatacattcacttatgcgacattgggagagcttatggcctttattatcgggtgggatttaattttagaatacatgctggcggtaagtgcagtgtcggtcggctggtctggttatttccaatcgtttttatcagggctcggcattcatcttccggttgctttaacagcggcaccgggcgcagtgaaaggcacctttaccctgtttaatcttcctgcattcgtcattgtaatggcgatcacatatttgctttatttaggcatcaaagaatcaaaaagagtcaacaatatcatggttatcttgaagatactggttgttctgctgtttatcgcggtggcagccgtttacgtgaagccgcacaactggcagccgtttatgccaatgggctttggcggcgtattcagtgcagcggcgctcgtattctttgcttttatcggatttgacgctgtatcctctgctgcggaagagacgaaaaatcctgcgaaagatctgcctaaaggcattattttctctttactggtctgcacgattttatatgtcaccgtatcagcgatcatgactggggttattccgtttgctcaatttgcgggtgtggatcatccggtttctctagttcttcaaagcgcaggacaaaactgggtggcaggcatcattgatattggcgccgtgttgggaatgacaacagttatgctcgtgatgctttacgggcagacacgcgtcatgtttgccatgtcgcgtgacggacttgtgccgggttcactttctaaagtgcatccaaagcacaaaacaccttatgtagccacttggtttttcggaacgatgtcggcgcttctcggctcacttgttccgctggatgaacttgcaaagctggtgaacatcgggacgctgtcggcatttgtacttatttctgtggcagttatcgttttgagaaagaaacagccggatcttccgagagcctttaaatgcccgggagttccgtttatcccgggcctggcaattctgttctgcctgttcttgattttaaatctgggatgggtgacgattgtccgcttcctagtgtggctgttaatcggcttggtaatctatttcctgtattcaagaaagcattcaaaattaaatcaataaccttttgataaagagagcggccatacaggccgctctcttttctgttcctggcaaatgaatctatagaaatgaagacaaaaataagagataatataggctggaaaggaagtgacgtttattgtctgagcaaaaaccagtccaatgggcttcgaaaatcggtttcgtcatggcagccgccggctcggctatcggcttgggcgcgatttggaagttcccttacgtagcggggaccaatgggggaggagccttttttcttatcttcgtgttatttaccatcctcttaggctatccgcttttggtgggggaatttatttttggaagacggaaccagacgaatgccattgatgcatataaaaaagaagcgccgcgatcagcttggtttcttacagggtggatcggtgtagccgcgtgtttcttagtgctgtcgttttacagtgtaatcgggggatggattttgctgtatatcgtgaaaacagcgtcaggatcactgtccgggctttctcaagcacagtatggcgctctttttgcttctattatccaaaatccggtgcagacgctcgtggctcagcttgtctttatggtacttactgtcatcgttgtcgcaagaggggttcaaaaagggattgaacgggtaagcgcggtgatgatgccgattttgtttttattgtttattctgctcgttcttcggtctcttacgcttaatggtgcaatggaaggcgtaaagtttctgcttgtgcctcatttcggcgatctgactccggaatccatattattcgcgctgggacaggccttctttacgttaacactgggggtttcggttatggtgacctacagctcctatttgccgaaaacacaaaatatccctcgttcggcagcctccattgtcttgatgaatatcattgtgacactcttggcaggtttggctatttttccggcggttttctcattcggttttcagccaaatgaaggaccgacactgctgtttacagtgcttccggccgtttttgaacagcttccgttcggcacgttgttttttatcggttttctcgttgcatttttatttgcagccttaacctcagcattttcgatggttgaaattatcgttgccacaatcggaaaaggggacgaaaagaagagaaaaaaactgtcatggacgagcgggcttttgatctttttggtcggaatcccatgctgcttgtcttatggcgttttgagtgatgtgcacctatttggcaaaacgttttttgatattgccgattttaccgtcagcaatgttttgatgccttcaggcgctctgttaatttctctatttatcccgctgaaaatttcgaaaagcgaactcttggctgaaatgcgaaatggatcaaatgcaggtaaagcattcttttacacgtggttttatttgcttcgttttatcgtgccgcttgccattattatcgtgttcttaaatttaatcggaattttatcattttaaaaaaacaggctccgtttccggggcctgttttttatttaataagatgatatcaacggtgcccatgccgttttcagtttttggatgccgagcctgatgtcctcttctgacaaaccgccataaccgattaagacagaagcaaaaggcgtctgttctttatatgagggagacacgggatagatggttacaccgtggtctgcggctgcttgtattgcttcttcctcacttgctggaaacaaaaggcgcagcaggatgtgaagccccgagttcttaccgagaatctcaacggtgtttcccagttcagagcggatggcttctaacaggacagcgtgtttttttcggtataagcttctcattctatttatgtgtttttgccactctccggtttcgatgaagtctgccagtgccaattgtgagtgggcagaaacggtctgcttcattaactgagcattgtttttgatcggttccatgagttcatggggcacaatcatgaagctgagccgcaaggaaggcagaagtgactttgaaaaagtgcccagatatatgactctgccattcggatcaagactctgtaaagacggaatgggatggccgctgtagcgaaattctccatcgtaatcatcttctataatgaatgaatttgtttctgccgcccatgccagcagctcctgtctgcgggtaatcgtcataatggtcccaatcggaaactgatgcgaaggagtcgtatacatgagataaggattctgacggtagagctcatccggcaggacgccttctgcatcagaacaaatcggagtgacatccatgtgatttgcttcaaacatccttcttgaacggtgaaagcccggttcttcaaagccgatttttgtacctggctttagcgaaaggcaaagaatttgcagaagcacggtggttcctgcgccgatgataatctggccgggttcacaatttactccccgagacagcctgacgaatcgggcaatcatgtgcctgagttcgtattctccttgagggtcgccagaggtgtgaaacgatccggaatagcgatcaagactttttactatgctttttctccatgcgttaaagggaaagagggtcgggtcaacgctgccctgatggaagtcaatagcaggtgcgttcttttcatgtaatcccggctgtacagactgctgaaaatggtcaggagctgtcgggaatcctggttctacttccgccgcgaaccagccgatttttggcttgcttttgacatagccctcagcagttaattgctcataagctcgttctatagttgccgtgctgacatcgagcaagctggagagcctgcgttttgacggaagtcttgttccctttgtgattcgcgcatgtgaaatttctagtttaaaaaaggtataaagctgctcatacagcggtgttttgctctttttatcaagaaacggcgtgatatccatctcgtgtctcctttttatctggcatggttattttttctgatattggctatttggcaaatgccatttattagctatgatcattgtaacgaaaggaaaggggattgagaagatgatccatatgaaacaattaacctcgaaagaagaatgggctgagtcgtatccgattatgagtgaattgagaacagaactggatatagagacgtatttacaaaggcttgaagcctgtgtgcagaaagaatcgtatatgctgtttgccttatatgaaaatacagcaatcagagcgctgtgcggggctctgccgagagtttccattcataaaggagagcacttgtggattgcggatcttgttacaacggcaccttgccgatcaaagggatacggcaaaatgcttttggattatgcctcagactgggcgagaaaagccggacttggttttgtcagtctttcatctggccttcagcgtaaagacgcacatcgattttatacagataaaatgggttttactatagaaagttatttgttccgaaaaccggtataacgaaaaaagacgcctgaaaaggcgtcttttttaaaagccaaactgtaaattcgtatctacagatacaatggtatacacacaaataatcacaaagagattaaggatgacgccgagcaggccggggcctgtgcgccctctcttgatgaagagttcaacaacgccgaacggaacggcagccatggcgaatggaagcatttgataggaataaaacgtgacattgctgataatggccaaattcagcaacagcagggacagaaccgctgtcccgacagagatccagccgaatacattgtgttctttaaaaattcttaccagttccataattccacctcgccgacattcgctgattttacagatttatttttcagcatgcgctggatttccttggttggccctgtaacgaccgaaccgtatacattgacaccgtttttctctacataatctaatcggttatctacattcaggtctttccgttttgaaatgacctgagcccatttttcgtgtttggacatgaattttagggcgttgataaactgatcgccattcgacttgccttttgtattaagggcggccaagaactttgaatcctttccaggatagccaagaggttctgtggaagctgtcttatttgtgtttttctctgtttcgattgcgttccacaaaaagctcacatcatagcctttgaatttgttatacacgtcttttgtcggatatgcacggtcatatgaaaggtagacctctgataccgttccttcaggcaatgtgcttaacgttttttctgcttttgcggtcgtttgttcagacttgtttgaaggatgtgtaaagtaatgtccggttttattcacttctaagtcatagtagtttactgccggcgcttttactttgttataaaacatttcaacccgttcattccctacggcagccgtcttcgtgccaatctgcttttgcagcgggaattccgtattcattccaaatagcttcacttggcttttcagtccggaagtatcaacaagaacattcggcatggtcagggctacagtgactgcggcagtttccataaactcattgccggtgctgtgtttcccacccattccgtaatagaggtagcttcccagcgtacaaagcggcaaaatcatcaatgtcgaaatgacggcaagcacagaaattcgcaaataagacttgcgtttgccgtaggctaaaatcgctttttgtttttcaggactgatgctgagatcccaatcgttatcgtcctctagttcgctgtcaatcagttcctgatatacttcgagcttctcaagttcttcctcaaatgcagtcatttcctggtcgctcatttccccatttttatattgatcaaaacgctttttaaattcttcattcatcattaacacctctattataaagtgctttcagccgctgtctggcacgaaataaaacacttttaaaattcgcctctgaaatattcataatatgggatgcttctttgtagtttaactcttttaaataatatagcgttaaggcctcccgataattatcggggagctcggacatataaccagtcagcacttcctttatctctacctgatgggcaggactttgaacagcattttgaaagaggcttccgattaagtcatcagaaatggttacttctttcttatgctttctgacgtaatcaatgaaggcgtttcgcgccacttgaaaaagccagggctttactttgctgtgatcataggagtgaatgtgtatgtatgcccgcataaaggtttcctgcagtaagtcttcagcaagatgcttgtcttttgtcatggagagcaggaacctgtaaacatcattcatgtacatttggtaaatttcatcgatcgtcactgccttttctcccctctatgttatacacgcataagaaaggtttaaagttgcacattacatgcaaacggcttttttatacctaatcaaacaccattactatatagtacccaaaaatggccgcaaaagatagtgcggagaaaggtttaacattttttccagaggggaaaagatagtgaaaaagtgaaggagtggcacaatggaatataccagtatagcagatacaggaatagaagcctccagaatcggcctcggcacatgggccattggcggaacgatgtggggaggcactgatgaaaaaacatcaattgaaacaatccgcgccgctcttgatcaggggattacactgattgacaccgcgccggcttacggcttcgggcagtccgaggaaatcgtcggaaaggcaatcaaagagtacggcaaaagagaccaggtgattctcgcaacgaaaacggctctggactggaagaacaaccagctgttccgccatgcgaacagagcgagaattgtagaggaagttgagaattctttgaagcggcttcaaacagactatattgatctttatcaggtgcattggcccgatccgcttgtgccaattgaagaaacggctgaagtcatgaaggaattatatgatgcgggaaaaatccgggcgattggcgtcagcaatttttcaattgagcaaatggatacatttcgcgccgtcgcacctctccatacgattcagcctccatataatctgtttgaaagagagatggaagagagtgttcttccttatgcgaaagataacaagataacaacattattatacggcagtttatgcagagggctgttaacaggcaaaatgaccgaagaatatacatttgagggcgatgatctgcgtaatcacgatccgaaattccagaagccccgctttaaagagtatctttctgctgtcaatcaattggataagctggcgaagacacgttatggaaaatcagtgattcacttggctgtcagatggatcttagatcagccgggagcggatatcgctctttggggagcaagaaagcctgggcagcttgaggccctatctgagattacaggctggacgctgaacagtgaagatcagaaagatatcaatactatattggaaaatacgatatcagaccctgtcggaccggagtttatggccccgccgaccagagaggaaatataacaaaagctgagggcgaatcctcagctttttggcgttttaacgggagaaatcttaaaaattagtaccaggtaataaaaaatgttgttataatagaagatagaaagaatcattgattacgacaaaggaagtgcgatatgtataagttttgtgcaaatgctttaaaagttattctttctcttcgcggaggagtgaaggtgtataacaaagaaaaccttccggccgattcaggttttgtcatcgcgtgtacacattccggctgggttgatgtgattacactcggagtcgggattcttccttatcaaatacactacatggcgaaaaaagagctttttcaaaataaatggatcggttcgtttctgaagaaaattcatgcctttccggtagatcgggaaaatcccgggccaagcagtattaaaacgccgattaagctgctgaaagaaggagagatcgtcggtatcttcccaagcggaacaagaacctctgaggatgtgcctttgaaaagaggtgcggtgacgattgcgcaaatggggaaagcgccgcttgtccccgctgcatatcagggcccttcaagcggaaaagaattattcaaaaaaggaaaaatgaagctgattatcggtgagcctcttcaccaggctgattttgcccacctgccttcaaaggaaagacttgcagcaatgacagaggctttgaatcagcggattaaagaactagagaataaacttgatcagctataaggcgttctgagagattgccctgaaactgtgaaaataagaaaagcaccttatacaaggtgcttttcttattatgcttcctgctggttagctgtctccagaagttcttcttcttgaagctttttcacttcaatatatgcgacgtggtggccgtcaatttcattaatgatgaattcgcagccctcttcgatgatggaatcatctttttcaacatcgtatttttgagtaaggaaccagccgccgattgtatcgacttcttcgttctctaaatgaatgcctagcaggtcgtttacttggtcaattaacacttttccgtcaagaatataatggccttcgccgattttgcggatttcgctaatttcatcaatatcaaattcgtcgcggatttcaccgacaatttcctcaatgatgtcctcaaccgtcacaagcccggcagtaccgccgtattcatcagacaatatggccatgtggaccctctctttttgcattttgacaagcaggtcttggattggcgcagattcaatgacatgaatgatcgggttgacgaattgagaaatggtggaatcaacagatacctcaccgctgatgcaggcggtcagcacttctttaatgttaataaccccgataatgttatctttatcgccctcttccacagggtagcgggtatatttttcaatctgaatgatgtccatcatttcagaaatcttgatatcatgcggaaggctgacaatttcagtccgcggaatcataatttctttcgcgagcctgtcgtcaaattcaaagattttattcacatatttaaactctgattggttgatttcaccgcttttatagctttcagacaaaatgattcgcagctcttcttctgagtgtgccagttcgttttctgaaacggtctccaggccaaatgctttggtcaataaccgtgcggaattgttcaaaagccaaatgaatgggaacgcgatgcggtaaaaccaaatcagcggtttcgcaaacagcatagacactgcttccgccttttggatagcgactgttttaggtgcaagttctccgacaacaacgtgtaagaacgtgataatggcatacgcaaaaataaacgatatgacatgtgaaagggaacctggaacattcatttggacgaaaagcgggtgaagcagcctttcgatcgttgattcacctaaaacccctaatccgatggaagtcaatgtaattccgagctgacacgcagataaatattcatcaagatgcgtggtcactttttttacggctattgctgctttatttccttccgcgatcagctgatcgatccgtgagcctctgattctgataatggcaaactcagatgccacgaaaaatgccgtcagggcgattaaaacagcaactaaaatcaaattcactatgtccaattagaaccttcactctagcaatgagaatgaaggtaacacctcctgttagataaaatggttttaacttaacagcagcataaatgattggaacacggcgagcttttcaggcgggagtttgcttttcagcttgtcacgatcctcgggcttcagccgttcaaaccgatgcaagattccggagatgttttgattcatatgatcaatttctaatgccagatttccaatttcatcatcaagtttagctgaagagggaaactggttctccagtcgatctttaatatcggacagggccaatcgctgcttcttgcaatctacaataaatataagtcttttgagtgcattttcgtcgtagtaacggtaatttgaacaggatctggccggcgtaagcagaccaagattcgtataataatcaactgtccgtttcgttactccggcgagtgccgctagttcactgatgcgataagtctcagccccatctatatccctcccaaccatcacgttatagttatgagaatagtttaatatatgaatggtgtcttgcacaagtttattgttttttttagaccggaattggaagttgtggaattcatcatctgattgaagtaacataggaagatagaattttcaaacttttatatacggaagggacagatgaaattggctgggttatcccgggaagttgaagaaaacttaaataaaggatcatggattcgcaagctgtttgatgaaggtgcaaggctgaagaaggagttcggggaagaccaggtatttgatttttcactcggcaacccgattattgaaccgcctgaagcttttaagagagcgttaatagaggaagctgaaaaaggcagccacggatacatacaaaaccaagggcttcctgcagcgagagaaaaagtcgcgcaatttttggggtcgcgttttgaagctgatttctcagcggagcgtatcgtcatgacggtgggcgcggggggcgctttgaatgttgcgttaaaaagcatcgtaaaccctggggaagaggtcattattctcgcaccttattttgccgaatataagttgtatattgagaactacgggggaaaagccgtcagctgcccgttgacaagccggtttgagatcgacattgaagcggtaaggcaatcgatcactccacagacgaaagggctgatcctcaatacaccgcataaccccacaggcactgttctcagccagaaaaatatagacgatttaggcgctttattaaaagaaatagaagagaagagcggccagacgatttatgtgctgtttgatgaaccgtacagtcaattaatctatgatgaagagctggcaaatccgtttcaatcgtaccatcgtgtgatattggccagctcattcagtaaagatctcggcatagccggggagcggctcgggtatatcggattggacagccgaatgccggatgcggaccttttgatcaacgcttttgtgtattgtaatcgaacgcttggatttgtgaatgcccctgtcatgatgcagcgggctgtggcacgaatggatgatttaagagtagacgcgagtgtttataaagagcgccgggatttaatggtagacattttaaaagaagccggttttgaatttgaaatgccaaagggaggtttctttgtttttccaaaatcgccgattgaagatgaagttgcattttgcgtgcatgccgcccaaaaatacaaattattaattgtgccgagcagcggttttggaatgagcgggcattttcgattatccttcagtgtgccgatcgagcagattaaaaactcacgggacattttcatttctttatataaagattttgcttaagaaggcaaagaaaagaaaacagttttcaaggctgttttctttttatatccacaaaatccttcctcttccaatccagacaggcgaagaattgacaagcaggcatgcagttaagtctttcttcatgataaaagtctaaaaattaaaaatcatttttggaatgagttgtgttacaataaaatatacaatttataatcaaactttgacttttggaggtggtaagatggggccctctgcttaggcaacaatacaccgcgtacctcaatgttaaggaaaaatgattatatcaggaggtgactccttatcctttgttgagaggatagggttaaatggacgatattgacagtctgattttaattggcgtgctcattgctttaaccgcgtttttcgttgcaagcgagtttgcgattgttagagtaaggagatccagaatagatcagcttatcacagaaggaaacaaacgggcgatactcgcaaggcgtgtcattacagatttggatgaatatttatccgcatcccagctaggcattacattgacatcaatcgggcttggcgtactgggtgagccggcctttgaacggctgctgcatccactgtttgaaccgctcggcttgccggactcggtttcacatgcagtctcttttgcagtcgcgtacggcttgatcacgttcctgcacgttgttgtaggtgaacttgccccgaaaacggtcgcgattcaaaaggcagaacagctgactttactgatagcgggccctttgcgtttattctatttgctcctgtttccgtttatttggatcctcaatggatcggcgcggcttttatgcgggatgttcggtttgaagcctgcgtcagaacatgatggttcccattctgaggaagaactcaggatgctgttatctgagagtttaaaaaacggagagattaatccgtctgaatataaatatgtgaataagatttttgaatttgataatcggatcgccaaagaaattatgataccgcggaaggaaatggctgctgtgtcaactgagatgacgatggccgagatgcttgaagtcatgctgaaggaaaaatacacgcgctggccagtcacagatggagacaaagacagtgtgatcggtttggtcaatacgaagcatttgttttctgatttgctgtttatgacagaagaagaacgaatgaagatgacgatccatccgtatgtgaggccggtcatcgaagtgattgaaacgatcccggttcatgatttgctgattaaaatgcagcgcgagcgcattcatatggcaatattgtcggatgaatacggaggaacctcgggacttgtgacgacagaggatattcttgaggaaattgtcggagagatcagagatgaatttgatgaagatgaacagccgctgatccaaaagcttggcgacggccattatgtgatggatggaaaggttcggatcgatcaggtgaacagccttcttggcgcatcgattcaagaagacgtcgatacgatcggcgggctgatattaaaagaaaacatcgatattgaggctggtgaatccattcgcatcggttcatattcgataaaggtgctgaagatggacggccgattaatcaagcaaatcgatataaaagaagaagccggcaacacaaccgggattacggcgcaccacaagctgctgctgcccgatcctgtgatgctgaacagtgcaaccttgagcgagaaataagctcaaggtttttttacattgtgattgtccagccgcaccaaaatgccaaaagcgatccgcaaagtgtcagggcgatgtacaagatgctttctattacacgtttggccataaggagttgaatagtttcaacgctgaaggtggaaaaggtcgtaaaggcgccaaaaaaccccgtgccgatgataagcgagaccgaagcatttgcaacgtgaagtcctgtaaatattccgagcccgagagctccgagaatattgactgtcagtatgccaatgggcaggctgagacctttggttttggcggttatgacattgccaagccagaagcgaagcattgcgccaagtccgccccctatgaaaatacccgctagtgtcatctttcctgcagcccctttctttgctgaatgcctgctatgcgccgtcccgcaaaaacaccaatcagtgcaaatatgatccctgatatcaatgaggctgccacatataaaagagccaatgagggttgtccttgcaaaagcatcactgtttccttagaaaacgtggacattgttgtgaagcctccgcaaaagccggtgcctaaaaaagccgacagcagaggccgttttgccccgatcagaaaaaatccggtcaaaatgcctaatagaaggctgcctgccgcattttccagccaggttgccgccgggaactgaccggtgtgtatccataagtttaatccgtatcggaggcaggcgccaagcgcgcctccgataaaaaccgcgctatatattttcatgtttgccatcctttatgatgaaatccgggtaatctgtaacgatgccgtccacgcccatggcttgtaattttgccgctgtcttttgattgttgacagtccatgcaaatatgtttaagccatttttatggatggagccgatcatcagacggttaagccgtgtgtgttttatattgacatagtttgcaaaagagcggaaggccttcatctgatttctggacagcatgccaaagttgggccttgtaatgaccgctgtcggaatcgaaggataaagctcgcggaacctttggacggagcggaactgaaaggattgaacaatattattgatagaaaaagaaaattgccctaatagctgtcccacctcttcttcaattccgacttgagacggatggccttttagttcaattaaaaggccgatttttttgtggtagcgcttgagcaccgcttccagggttggaatacgctctccttgaaaagcgggaccgtaccagcttcctgcatcgagtttttgcaattcctccaaggtaaaatccttaacaaagcccgatccgtttgttgttcggtcaaccctgtcatcgtgtatcacaacaatctgcctgtcttttgtaagctggacatccagttcgatcatatctgcattcattttcaccgcaaggtcaaatgcggcaatcgtattttccggagcgtagccggatgctccgcgatgggcaatgatgtacaagctaagtcagctcctcgtatgggcatttctgttattgtatcaaatccatatatgcaccgcgatacaaactggtgaattttttctgccatatcggaatggtccgggctgaggaatgcgtataactaaaaaaagacactcagcgtatcagaacacatttcgtcagaaaattaggtctttcgacatgttcacaacaaaatatgatcctttataatagcaaaaaaggaggcgagatcatgggaaaagggagaatcagagtggaggaaagaattaaagccgaaacggatgctgaaatgcaaaaagcaactctccttgatcagacacaaacgaaaaaaggtaagtgactgtccctattgaatctggctgatagatgaattgagaaatgaccccggcgtttcgccggggttttgtgctgcaaaagacatttaaatgaacatccttacgaatattttagtataataaacaattgattgggatagaggggagacagtcatgccggattatctgcagcagtattttacgcttgataacatcatacaaatcggcatcagcttggcgattttgctggtgtttcttatacttagaaaattattcacaagatatttctttaacctgctttttaatttgacaaaccggccgaaaacagaaatttttaaacaggtggttctggcgtttgataagccggccagatggttttttgttgcccttgggctgtttttagcgatccggtattcaccgtttttagatgagcaaatgccggtcatcagcaaaatataccgctcactgattgtggcgcttttgtgctggggtctttgtaatttgaccgcaacatcgtcgtttatcttccataaggtgaatcagcgcttcgagcttgacatggatgacattctggccccgtttttatccaaattgctccgttttgtgatcattgcgctcagtgtcagtgtgatcgctcaggaattcaattatgatgtaaacggatttgtagcgggccttggtcttggcggactggcttttgcgcttgccgcgaaggataccatcagcaacttcttcggcggtattatcattattactgaaaagccgtttacaattggtgactgggtggagacgtcgacagtaacaggatcagtcgaggatattacctttaggagcacgagattcagaacagcacagggggcgcttgtaacggtgccgaactctacgctgtcgatggaagcgatcacgaactggacaagaatgaccaaacgccagattacgttttccatccatgtgtcctacgctacgccgattgagaaccttgaacgctccattcattctctcagaacaatgctcttagagcatgagggcgttgataatgaaacaatcatggtcaactttgatacgtttgccgacagctactacaatttattttttaacttctatacaaaaacgacggtttgggctgaaaaccttaatattagagaggatatcaactataaaattattgagattttaggtgcagaaggtgtccagtttgcatatcccggccaaatggttgttgtcaagcaaaagcacgaaagtgacccattccaggtgaatctaaataaagaggaaaaggaacgggcttaaaagagagacttcgtctgacagaggcggagtctttttcatggtaaaataagagaaaaaggcggtgttgagttggaaacattcaaaagtattctacatgaagcacagcgaattgttgtgctgaccggagcgggaatgagcacagaatcagggattcccgactttcgttcagcagggggcatttgggcggaagatgcctcaagaatggaagcgatgagccttgattattttttaagtcatccgcgtctgttttggcccaaattcaaagaattgttccagatgaaaatgagcggcagctttgaaccgaatgaaggacacttgcttttagctgagctggagaagcaagggaagcaggtcgatattttcacgcaaaacattgacggtcttcataaaaaagcggggagcaggcatgtatacgaactgcatggttctatccagacagcagcttgtccggcatgcggcgcccgatatgatcttccccatttgctggagcgggaggtgccggagtgcacggcggccggaaacaatggggacatttgcggaacggtattaaaaaccgatgttgttctctttggcgacgccgtcatgcactttgacaccctttatgaaaagctggatcaagcagatcttttattggttatcggcacgtctctcgaagtggctccggctagatttgtgcctgaggatgcaagtctgattcccggcatgaagaaagtcatcataaaccttgaaccaacgtattgcgacagcttgtttgacatggtcatccatcaaaaaatcggtgagtttgcccgaagtttgggcataaaaaagtgagccgccttatgcgcctcacttttttattcatgaacaggaaccattgtgtcctctaacactccgaaggaatagcctttttcttttaatttattgattagtaccggcagcgcgtttacggtagcgggaagatcatgcatgagaatcacattcgggcggcctgaagagctgtgttccatattttcaagctgctctaacacggccgtcacatactgtgaatttcggtatttccagtccatgctgtcaatcgtccaatcccagtacacaaaaccgtctttctcaagattgcggatttgtgagggggttagtgacggtttgcttccgtagggcgttctgacaagagcggttttatatcctgtaatgtcctgcagtgtgtcacgcgcctcctgcatttcttttagcggagatgtcggtgtttgatagaacaatctgttattgtgggtaacgccatgtaaaccgagtgcgtggccttccttttctgctcttttcacagcctgcttgaattcgttcatccgcggtgacagcataaaaaacgtcgcttttacatcagcgcttttcagtacatcgagcaagcgggttgtaacggctgaagggccgtcgtcgaaggttaagtaaaccgttttatctcccatgttctgctttgtctgcagatgttttatcagcagatcgggggagtcgtttttcagcttaaggctttctttctcatctcgaagctggccgtttgttgtgacagtgacttcctttgctttcgttgaactgttggaataacccaaaatcaccataagcaaaagcagcacacataaaactgctaaacttgcaaatttaaaagcaagcgaaactgcagaaggagaagcctctcctctcgtttgtcgcataacaatctctccattggcataaaatctctacataatgctgtacagcaggcagcttatgaagatgccttatgtttacaacctatgtattaccagtcaagtatacaggaataaaactggaaagcacatagaaaatttgtcgaaatgtcagattttaaggaaaaaataaactcctttccgctatagatctcttgatctttctgtttttcggcttgtccaatatggtagaattagtgataatgacagcttgaatgacatcagggacatctcgaaaagggagggcttttatgaaggttttagtcaatggccggctgattgggcgcagtgaagcatcaatcgatttggaagatcgcggttatcagtttggtgacggcatctatgaagtgatcagggtgtacaaaggagtattgttcggcttacgtgagcatgcagagcgttttttcagaagtgctgctgaaatcggaatttcactgccattcagtatagaagatctcgagtgggacctgcaaaagcttgtacaggaaaatgcggtcagtgagggtgcggtatacattcagacaacaagaggtgtggccccgcgaaaacaccagtatgaagccggcctcgagccgcagactactgcttatacgtttacggtgaaaaaaccggagcaagagcaggcatacggagtggcggccattacagatgaggatcttcgctggttaagatgtgatatcaaaagtctgaatttactgtataatgtcatgacgaagcaaagggcctatgaagcgggagcatttgaagccattttacttagggacggcgttgttacggagggtacatcctctaacgtttatgcggttatcaacggcacggtgcgaacacatccggctaatcggctcattctcaatggaattacacggatgaatattttaggactgattgagaagaatgggatcaaactggatgagactcctgtcagtgaagaagagttgaaacaggcggaagagatctttatttcgtcaacgacggcagaaattattccggttgtgacgctcgatggacaatcggtcggaagcgggaaaccgggaccggtgaccaaacagcttcaggctgcttttcaagaaagcattcaacaggctgctagcatttcataaatgaacgaagaaaagagcccgctttatacagcggagctctttttattttttaacaaatccaatcaaaatggagatcatcggcgatatatagaggaagaacgtaaacgggatgtagtctatgactggaacaccaagtgcgctcgccataaatgcgccgctgacgccccaaggaatcaatgggttaattaatgttccgccgtcctctaatgaccttgtcagaaatttgcgctggatgttttgtttgtcatataaggatttaaatgattgtcctggtattaatatcgataaatactgttcaccggttgccaagttgacgccgatgcttgagcagacagttgctgcaactagacggccttttgagcggatgcctttcatgatgccttccaatagtgcagaaatcaatccgattttctccatcaatccgccgagtgcaaaagcaatcataatgagagagacagagcccatcatggattgcaatccgcctctgttgataattttagcggctgcctcattgtcagtttcgaaagttgtgccattttgcaaagctgtcataaacgcctgcaggctgctgtcgggtacaaaaatagcagtcaaaattcccgaggaaataattccggcagtcagaacggggattactgatacccgtttcattgccagcaaaacgactaagagcggagaaagaagggcccacggtgtcacgtttgcaacatcttttattccggttatgacctgctgaatattatcggttgaagcagcgtccgctgacactgatgaaccgagaaagtaaaacagaacgacagtgatgagcaaagctggaatggttgtgcccatcatatggcgaatgtgttcaaagatcggtatttcgcctattccggctgcaaagttggttgtgtccgacatcggcgacattttatccccaaaacaagcgccgcatatgactgcgcctgctgtccattcaagcggaacgccggccgcgctcgctacgccgatcagcgctaccccgattgtgcttacagttgtcaggcttgagccaacaagtgtgctgatgatcatacatgaaaacaaagcagtcaacagaaggtggcttggttcaataaaggatagggcataaactgtcacagtcggtattgcgccgctgtacatccaggcgccgattaagatgccgatcagcgctagaacaataatcggctgtacgccgtttttgatcccgtctacaatccctttttcaatactcttccaggaaaatccaaaccataaagctgctgctgaaagcatgacaacacttaaaaacagcgggatatgaggttctacatgaagcaagaataagcaagaaataataatgcataacatgaatataaataaaccgacggctaacggaaacgtcagctttttttgagaatccaaaataacaccccatatttatctttaatgcttttgtgcttttgggcacgaaagcattataacagaaaaaaacgaaaatctatgttttttcacaattatgaatataaaagaagtgagcacagggcgtgctcactttacaatcaggacgggtatatccgatttcgctgaaagcttttcacttacacttccgaatattagctttttcagcctgttttggtctctgcttccggttacgatcatatcggcagaaatgcggtttgcatgctcgataattgattcagccggatcgccttctaatatatcgatatctccatctgcctgctgttcattcagcatcattcttgcttcggcgatgacttcttccgtacggtcttcatagatcattggctcaggtgatgttacacccgatatcagcggatcaggaacacttgtcatgcctccgctgatatagcttgcctcagctgcgggtctgggtgggtcgatgacggtctgattgtctttcatatcatgtgaatgggcgacggtaatagcggcatttaaggttttagcaagatcaatggctgtctgaagcgctttcttactattttcacttccgtcaaacgcaacaatgatacggtcagcatggaacatccttctcaccctttcaaagcgtcttacaacactactacccgaatttgagcacaattaaccttttcctattcaagtaatgattgacaataaaaggttttgtttatatgatgataaaaagatgaaatcagaatggaaggagggtttgctatgccaaggaatttgcgtgtttatcaaacagtttcatattggcgcggcaaaccttttgttctgttttcgtgaacggttttttaggtcggaccgcgcgctgaaaagcgctgtgcgtaacatatcggttaaaaaaggcatggagctgacgcttcatgccttttttatatacaaaatctaaggaaagacaggtgtatgggatgtgaagacaaatacagaggcgagggctgttcatgccaaactggatgaaaaaagctgcaaggaaaaaatagaaggcggctgataaggagatggggatagatgttttcagttttgaaaaagcttggctggttttttaaggcgtactggctgcgctatacgattgcgattgtccttttattagcagtcaatgtcattgaaatgtttccgcctaagctcttggggaacgccatagatgatatgaaaacaggggcatttactgcggaagggctgctgttttatatcggtatcttttttgtgctgacggcggccgtgtatatcatgtcttatttttggatgcatcagctgtttggcggagcgaatctgatggagaaaattcttcgtacgaagctgatggggcatttgctgactatgtcgccgccgttttatgaaaaaaaccgaacaggcgatttaatggcacgagggacaaatgatcttcaggccgtcagtttaacgacaggatttggcatcttgacgttagtcgattctacgatgtttatgatgacgatctttttgacaatggggtttttgatcagctggaagctgacctttgccgccattatcccgcttccagtcatggcgattgcaatcagtctatatggaagtaaaattcatgagcggtttactgaggcccaaaacgcgttcggggcgctgaatgacagagtgctggaatctgtttcaggcgtgcgggtgattcgcgcgtatgttcaggaaacaaacgatgttcgccggtttaatgaaatgaccgctgatgtttatcagaaaaatatgaaagtggcttttattgattcactgtttgagccgacggtgaaactgcttgtcggcgcaagctatctgattgggctcggctacggagcgtttcttgtattccggaacgagctgacgcttggagagttagtgtcctttaacgtttatctcggcatgatgatttggccgatgtttgcaatcggtgaactcattaacgtgatgcagcgcggcaatgcgtcattagaccgggtaaatgaaactctttcttatgaatcggatgtgacagatccaaaacagcccgctgatcttaaagagcctggagatatcgttttcagtcatgtcagctttacatatccaagctcaacaagtgacaatcttcaggatatttcatttacggtgcgaaaagggcagactgtcgggattgcaggtaaaaccgggagcggaaaaacgacaattattaagcagcttttgcgccagtatcctccaggtgaagggagcattacattttcaggcgtaccgattcagcaaatccctcttgaccgtctccgcggatggatcggatatgtgccgcaggatcatttactgttttcacggactgtaaaagaaaatattttatacggaaaacaggatgcaactgataaagaggttcagcaagccattgccgaagcacattttgaaaaagatttgcacatgcttccgtccggtctggagacaatggtcggtgaaaaaggcgtggcactgtcaggcgggcagaaacaaagaatttcgattgcgagagcactcatggcgaatccggaaatcttgatcctggatgattcgctttccgctgtagatgccaaaacagaggctgcaattatcaagaacatcagagaaaaccgcaaaggaaaaacgacatttattttgacgcaccgattatccgcggtagagcacgctgacctgatccttgtgatggacggcggcgtcattgctgagagtggcacgcatcaagaactgctggccaataatgggtggtaccgggaacaatatgaaagacagcagctgttcactgcggaagaagggggagcaggggcatgaaaataggaaaaacgttatggagatatgcacttctttatcgaaaattgctgatcacagccgtccttttgctagctgttgccgtcggtgcagaactgactgggccctttattggcaaaaaaatgatagacgaccatatcctcggcattgagaaaacatggtatgaagctgcggaaaaagataaaaatgccgttcagtttcacggcgtctcatatgtcagagaggaccgattgcaggagcctgtttcaaaagcaaaagaagcgcatatttatcaagtgggaatggcattctattttgttaatcaggctgtcagcttcgacgggaatagaacggtttctgacgggaagctgacgatcacaaacggagacaagagccgggcatatgctgccgaaaagctgactaagcaggaacttttccagttctatcagccggaaataaagggaatggtgtttctgatctgcctgtatgggggcttgcttgtgttttcggtattctttcaatacggacagcattatctgctgcagatgagcgccaatcggattattcaaaagatgaggcaggacgtgttttcgcacatacagaaaatgccgattcgctattttgacaaccttccggccggaaaagtcgttgcgcggattaccaatgatacggaggctatcagggatttatatgtcacagtgctttcaacatttgtaacaagcggaatctatatgttcgggatattcacggctttgtttctgcttgatgtgaagcttgcgtttgtatgtctggcaattgtgccgattatctggctgtggtcagtcatataccggagatatgcgtcatattacaaccaaaaaatccgctcgatcaacagtgacattaacgcaaaaatgaatgagtcaattcaaggcatgaccattattcaggctttccgccatcaaaaggaaacaatgagagaatttgaggaattaaatgaatcacatttttatttccaaaacaggatgctgaatttaaactccttaatgtcccataatttggtcaatgtcatccgcaatcttgcgttcgtctgtctgatctggcattttggcggtgcgagcctgaatgcggcggggattgtttctatcggtgtgctgtacgcgtttgtcgattatttgaaccggttatttcagccgatcacaggcatcgtcaatcagttttcaaagctggagcttgcaagggtctccgccgggcgtgtttttgaactgcttgaagaaaagaatacggaagaagcgggtgaaccggcgaaggagcgcgcgctggggcgggttgaatttcgtgatgtgtcatttgcgtatcaagaaggtgaagaggtattaaagcatatttcctttactgcgcaaaaaggcgaaaccgtagcgctcgtcggccataccggatcaggaaaaagctcgattttgaatcttctgtttcgtttttatgatgcgcaaaaaggtgatgtcttaattgatggaaaaagcatttacaacatgtcaagacaggaactcagatcccatatgggtattgtgcttcaggacccgtacttattctcgggcacaatcggatctaacgtaagtctggatgacgaaagaatgactgaagaagaaataaaaaatgcactgcggcaagtcggtgctgagcctcttcttaagaagcttccgaagggcattaatgagcccgtgattgaaaaaggcagcacgctatcctctggagagcggcagttaatttctttcgctagagctttggcgtttgatcccgcgatcttgattttagatgaggcaacggcgcatattgatacagagacagaggccgtgatccagaaggcgcttgatgtcgtcaaacaaggacgcaccaccttcgtcatcgctcaccggctttcaacaatcagaaatgctgatcagattttggttcttgataaaggagaaattgttgagagagggaaccacgaggaactgatggcattagaaggccaatattatcaaatgtatgaactgcaaaagggacagaaacattccattgcataacgctcaaaaacccaaaacaatcgtgttttgggtttttggtttatgtagtcaataagccagtccgacacggtttccgacatactcacctgtaacgagctcacgatataaaaagtccgcagtatcgccgaccgaaatgcttgtgccgccctcaggcaaaacgttacgctccgtacgataaacgccggttgctgttccgtccgggaggtaagtggggcagatgattgtccagtctaatgatgattctttaagcatttcgtatacttttgcatgctccttggctgcgcgggtctgctttcgtttcgattcatttgtttcaaaccggtattttcccggttcatatcgggaatctaggatccctgcggtgccgatcgtaataagccgtttgatatgctgttcctccataacggagagaatgtgtgccatagcagttgacaaggtatcatcaccatctgtgcctagacagctgatcacgatttcagcattctccattatttttttcacatcttctaagcggcgggcgttccccatgacggttctgtcttttgaaaggggaagatcagcatgttgagatctgatcagagcgaaaatatcaaatctttcatctgctgcagcttgtgttaaaaaggcttgtccgacgcggccgctggctcctaataaagcgattttcattaaaaaacctcctcgcctttcattataaaaggatgttctcagtttgaacagcgcgggaaagaatacctgtacaaataaacagaacgatgggaaacatattcatgaatcatggatacacttacgaattgaaccagctcccaattcacaatggtgatgaatgacaccccgattccctccctttttttctaggatatgtggagcaggaaaaaagggtgacaaaataaagagagcgcggaaaccgcgccctctatagccatatattgaattgttattgaactctgccgcccatttgctgctgagcgaaagatactaaacgttttgtgatttctcctccgacagaaccgttagcgcgagaagttgtgtccgctccaaggttaacgccgaattcagaagcgatttcaagtttcatttgatcgatagcctgagctgcgccaggaactagtaagtcatttgaagagttttggttagccatgtgtaaaatctcctttttatttagtatggttgggttaactggagttgcaccaatctgtgaacccttctcgggtgtcactgccgcctcggcgtaacccaatgctttgccggcttgttactacgtattatgttaaaatggccggaaaatcatgcggagaattgtgtggtaaatcttgagaaataaaaaaagcttagccgtttaggctaagctagtcataaatatgaaaaagcatcagttcatgtatctcgtttgtaagagcaggctcgtcagcgcgggcgggaaacaagtctccccattcaatctcaccgctcttatgatagatgccttcataatgggtccctttataataaaatgaaattttccatccgggcagcttttcttttgggaacaaaggtttccagctgaaatgagaaatcattacggccacgctccttacatttggtatcaattgacctaaataaaaacggcttatgttcattgtatcattgtttcagaacatcattgaagaggcctaaatatgcagtttgtcccagctttggataaagataagcccgctttattaaaaaagcggacaggttacgaaggccacaatgcttccggagatgtgattgccttctcagataaatatgacgcgtattcaaaacttcttcgttttgtaagagaatcaacatgatgcaaatttggatgagaaaaaatgcttcggcccgggcgcgaattcgcttcaaacatccatactttaccgttctgatcaatgccaaaatcgaaaccaatctccccgataaatccctcgatatgatcatgaaggacatggcttgcagtcagtgccgctgcagaaagctttttaatgacctcaactctttcagcgggatcatcgtatacttccgcaagtgtctttacagtgccgccgttagaaagatgtgttgtaatgctgttctttccggaaatttttacggcgattgctgtcactgtccattttccttttctgtttttattggtatggacacggaaatccgctggtttgccttgaaattcgatgagatcaacaccttgctgaatgagaaagtcggacgggttgtgatgtttttgaaattctgcaaggaatgaggcggcatcggaataatcaattgatgtaaaagttttggcgtcattcgtatgctttaccgtcaggccgccatctgttcttgtcagctgataaatgccggtgccgagtgctccatttgccggtttgatatagacttttttgtatgcgccacagagctcatcaatcagctccacagacggtgtcagctcggatctaggcaaaaagggtgccgttctcggatctttttcgagcaattgatgaacgttccatttattgaaaaacgttttattaaaccatgggatctgatattcatcgatcagcctcttttttgtatgttgcaagagaagtgaatcttcaatttttcggttcggcaaacggtcataaacgacgttcggcaatggaacgatttttttctcccagccgttttccctgtaaaggaggccttcaatcgtgccttcctcccaattgatttggtgcgcgccaaaaacgaagcagtagcccccggcttgctcgtgtaacgtgacaagtttagaaaaaaagagggaacgatccttaaatggacgttcaagagatacagtaaaccctgccgtaaagatgccgactaacggcccgatatgcactgtatgatcatgaatcagtatatcagccctgcttcggtggggaagcaaaagctcatgaaacagattttcagagagaagcacggtttgttccagatgccgtctgtaagcaacgtggcatctgacaaccttcgttccgaatgcggcatgcaaaagtccgtctcgcttcagcgaagagggcagaaacagggtattttcactggttttgtctatgccgatcaaaaaccgtttaggattcacgcggaagaactcctttctggctttgctcagaaaacagatattggcagcgctttaggggacaagtgtacagctgttctttttgctcgggagagacacgcaggattgactttctgcctggtttggaattgatatctaaaatccaaattctcccgtccttagcaagacatatatcaagaccgagttcaaacaacggcccatagcgctcgtcaagataatacggaaccgattgggtaatcgaaaacacatcatctagtaagaccacttgctgttttttcggtatatcttcaaaccaggagtcaaatgtcagcgcatcagatccgcctgacaaattggccagcagcccgtgtttgtatccgcgtcttactgcctttccgactgtattccattcacctgcttcgtttttttccataaacaggcgaatatcacaagggtattgttccttatcttgaatgtttaagtaaggctgaagcaaatattgatgctgaagcacttttttgcaccatgttttaaaagaagtctggttggaaaacgtttttgtctgcttatcctttccgatgtgataagtagcagtgatgtttttcttgcccagcttcaaaagaatcacgcctctgcctcccgcgccaaatgccggtttaaggatgcaggctttttctttggataaaaaggagtgaatttgttcgtagcggctcacctttatcgtttcgggaatatagggattgattacagagtgctgctgcaaatcgtgaaggacggtccacttatcgggaagaccccgcccgataaattccgttttcggatattttttgagccactcaacgattggttttgctttttgggaatgtgaatccttgccgtaaaaacagcgatcataaatataatctggaatcgccatttcagtttcgttccatgtgctgctggccgaatgatagaccgatgctttgacacgcaaagtgtcaggtgaaatatcaaatggtgtaaaccggatgaaacgtatgccgaattcgggtgctcttttggccagttctgcggaataatccgcttcatgctggcgggataaggacataaaaccgagtgttatcatggtgagactcccccttttattcaaaagctgccggcgggtgtccgcagctttacactaaatacatgtaagacgaacgcagctgacggtattctactttacagaatacgattctccaccttgccctattccaaaagaacaagctgattttctaagaacaggaatttgtctcctcgtttgctaagtgattgcatgagcctctataatacgtataggtacataatctatatgaaaaaagctgaagcacagatggaggaagatgaataggaatgggtattgcaggaacctttatttttatgatcgtgatcggcgctgccattggagcggtgaccaatcatttagcaattcaaatgctgtttaggccgtataaagcgtactatttgtttgggaaacgagttccttttacgcccgggctgattccaagacggcgagatgaacttgcaaaacaaatgggactgatggtagtcaatcatctcttaacccctgaaggcattaaaaagcggctcgtctctgatgcagccaaaacgcaggctcttcgagtgggggaacagctgattcaaaagctgtcactttctgaagtgacagtaaaagaagcgcttgaaaaagccgggatgaagcgcccagaaaaagctgctgatgcatggatcagcagctggaccgatgataagctgaatgagcttttccgccaatacggggaccaatcgttaaaagagctggtgcctatagaggtgcaggaaaagcttgaggaaaaaattccgatgatttcaggatatatattgtcacggagtgtcagttattttgaaagtgatgaaggaaaaatccgtcttggcaatatgattgatgactttttaaaagagcgcggcatgcttggaagcatggtgcaaatgtttcttggcaattcaagccttgcggatcgcgtgctgccggagctgctgaaattcttgcgcaatgaggaaacaaataaattgctttctgatctcttaaaaaacgaatggggcaagctgagggagtatacgtttaatgaagcagatgaaaaatggaatgcaaaggcgctcattttcagtttgaaacgaagagtgctgcaagcattttcgactgcccctttcttcgacaatacgattggcacgcttaccgtccgctatgaatctgagctgacccagcaaatgctgccggcactgttagacaaattgcttgaagggatttcgtccaaccttgaaagtgtcttaaaacggttgcgtcttgaggaaatcgtcaaggagcaggtggatcagttcccggtggagcgtcttgaagaaatggtgctgtccatttcaaaaaaagaatttaaaatgattacctatttgggggccttctcggcggaattataggcgcgattcaagcattgtttgtcatccttttttaagaagaaatggtttttgattaatgaaaggagctccatagtctgttatagtggagtggtatgtcaaacggcaatgatgaaaggagctatttacaatggctgttaatttttatgatgtagcgtatgatctggaaaatgcattacgcgggagcgaagagttcacccgtttaaaaaacctttacgacgaagttaacgcagatgaatcagcgaagcgcatgttcgaaaacttccgtgatgtacagcttagactccagcaaaaacaaatggcaggagaagagattacacaagaagaagtgacgcaggctcaaaaaacagttgcgcttgtacagcagcacgaaaaaatttctcagctgatggaagcggagcagcgcatgagcatgctgattggtgaattgaacaaaatcattatgaagcctttagaagagctttacggcagtgttgaaggctaataagcaaaatcccttcttggataagaagggattttttattcattcagcaaacttggaaatccaatgaatcttttacctctccattgatgatcactgataatgtatgaattcctttgtaatgctttctggtggttaaatccttaaaggattggtttcttgtgtatgacttcgtttcgttttttcgtatagttgtttctgttattttaaatactttctgatgacgctggcctcttgcttttacaaaatcaattgcgtactcaattcttactttttgatccctgtctgaatgaatatagaaagaaaattcaaggctttcgccaataactatacgtttgggctggcctgttaaatcatgtagttgtatcgaatcagcattttcataaccaaaaagcgctaaggcctgtttatcacccttttttaataaggtccgataggcgtgtttgataatccagtctgtatggggatgtgttccgtaccattgatctgcgacttttctcagtaaatgaggatgcgtttttgatatatcattaaggttgttggccacgctttttcttacatataaggactcgtcctgcatcagcttctcaaggatcggcaatacgggggaagggtccgatttcaaagccggtatcgattttccccatggcaggcggggcctgctgccttcgctcgcaagtcttctcacgtgttcatttttatgctcagaccatgcaagcaattgtgcaaccatcttttcttgatctaacagcaaaaaaggccttacagcaaattctgaggtcgaatattgcgtaaagtattccaatgcctttattgattcttcccaatgcgctaacccgtactgttccacataatctggaaataaaattccgctgagtcctttaaaatgaggggctgtatcccgtaaaattgtgagcgcttcaacgtattgttttggcaaagtttcgtataaagaaactgtcacgcggcgcatccgctcttttaaagtgagttcaggccagtcctccagccgtaatgtatcctcgaatctgtctttgttaaaatcaggataggatgaccttacatgatggatcaactgagatatcagttcttcattatatatttcttttaaatcagccatataaacaccgctttttcgtttattatttatattgtatgggaatgtacgttctggatcaagtgtatagtcctaaaaattaacaactgatcctaccacggatatacaaaagttggttactttttttagttaaaaaaacccttgtcatcggaaaagaaaactgagataataacattgaaagcgcctacacttacctatttcaaatggatacggtcgcatatcatgccgttatatagaggggataagcaacagagagtaagtgttcggagcgcatcattggtcaaacaaggggttcctgatacatgatttttcgtaaatcgaaataacgatattagggagaatggctgcttcgatcgtatcctatcaacaagccatacataaagtctgctgagccaggctttttttgctttaagaaaaggttgttctaaacacagagacagggtcatatcctatacacaagtacagtcatcaaggagggggacatctctgtgtcaaaacaattgcttgccttaaatatagatggagcgctgcttcggtcgaacgggaagattcatcaggcaacgaaagacgcgattgaatatgtaaagaaaaaagggatttacgtcacacttgtgaccaaccgtcattttcgctcagcacagaaaatagcgaaatcgctaaagcttgatgccaagctgatcacccatagcggggcatatatcgctgagaaaattgacgccccgttttttgaaaaaagaatttctgatgatcatacctttaacattgttcaagtgctggagagctatcaatgtaatattcggcttcttcacgaaaagtattccatcggaaacaagaaaaaggtgaattcgaatttattggggaaagcactcattcatccgtctgacccgatcttttatccagtccagttcgttgaatcattaagcgatctcctcatggatgagccggtgagtgcacccgtcatcgaggtgtacacggagcacgacattcagcatgacattacagaaacgattacaaaagccttccctgcagtggatgtgattcgcgtaaacgatgagaagctgaatatcgtcccgaaaggtgtctcgaaggaagcgggtttggccctcgtcgcttcagagctgggcctgagtatggatgatgtcgtggccattgggcatcagtatgacgatctgccgatgatcgaacttgccggtcttggggtagcgatggggaatgccgttccggaaattaagagaaaggcagattgggttacaaggtccaatgacgagcaaggtgtcgcttatatgatgaaggaatatttccgaatgcagcagcgaaaaggatttcttgataagttccacatgaaacgtgtgtaaaaaagccgctcgcaccctgacaggtgcggcggcttttttgccggattgattttagcagtttatttctgtacactaaagaaagttttgaatctgataaattaggtgatgaagttgcaaattaaaatagaaggcatacatgatgaccgcctgcatcggcctctgcaaaatattgcaaatttgttttatgaagagtgcgagcttgcgtatggcggagaggagcccgcagattttgtcatttctttagcgttgtcacaaacggatgagcatgtgacggtttcgggagaagtgaagggaactggcataaaggaacagcatacaaaattcttttctcccggcatgaatgaaaaagaagcttttaagcaagtgaaaaacacaatttcttatgtgtatctcaatcttcttcaggcgcatacgggcattacgcagaagtggggaatcctcacaggaatccggcccacaaagctgcttcataaaaaactgcaaagcggaatgtccaaggagcaagcgcatgctgagttgaaaaaagactatttaattcatgatgaaaaaatcatgctaatgcaggaaattgttgaccgtcagctggcggcagttccggatttgtaccgagtaaaggatgaagtcagcatttatatcggcattccgttctgcccgacaaaatgcgcgtattgcacattccctgcgtacgctatccaaggacaggcgggcagagtcggctcattcctatggggactgcattacgaaatgcagaaaatcggtgaatggctgaaggagcatgatgttaaggttacaaccatttactttggcggcgggacgccgacaagcattacagcggaggagatggatctgctgtatgaagaaatggtccgctccttcccggatgtgaaaaacattcgtgagattacggtggaggccggtcgtcctgacacgattacagaagaaaaactcgccgttttaaacaaatatgacattgatcggatcagcatcaatccgcaatcctacgaaaacgaaacgctaaaggcgatcgggcggcaccatacggttgaagagaccattgagaaatatcatctgtcacgccagcatggcatgaataatatcaacatggacttgattattggtttgcctggggaaggcgtgaaggagttcaggcacagtctttcagaaacagaaaaactgatgccggaatcccttaccgttcatactctttcatttaaacgggcgtcagaaatgacgagaaacaagcataagtacaaagttgccggcagggaagaggtttctcaaatgatggaagacgcggtagcctggacgaaagagcatgggtacgtgccttattatttataccgccagaaaaacattcttggaaaccttgaaaacgtcggatactctttgccgggacaagaaagcatctacaacattatgattatggaagaggtgcagacgattattggcatcggctgcggcgctgctagtaaatttattgatcgggatacagggaaaattacgcattttgcgaatccgaaagatccgaaatcgtacaatgagcgcttcgagcactacacggacgaaaaaatcaaatatttagagcagatttttgaaaaaacgacaaagcagcactgatcacagtgctgctttttttatccctgtttttttgcgggctgaacctcaggcttccatttaaataccttgttaagcaagcggtaaattcgttttgattcctttgtgacaagcggtcccaaaatcgccagaatgaggacatataatgcggcaaacggctttaatgtggccgacagtccgccggctatcccgagattcgcaacgataatcgaaaattctccccgcgatacgatcgtcagcccgatattcgatgaagccttatgagaaagccctgcgcgtcgtcctgccaccattccggcgataaaatttcccagaatggtcaaaatcactgcacccaacgcaagccaaaccgcttcacctagcgaaaacggatcgatactgaggccgaagctgaaaaagaacatcgcaccgaagaagtcgcgaaacggaacaacgaggtgttcaatcctatcggaatgctctgtttctgaaaagaccaaaccgagcagcagcgcgccgattgcttctgctacatgaatcgtctcggaaaacccggcgataaaaaagagcgctgcgaaaatgacgataataaacacttcgtttgagcgaatgtccaacagtttgttcaacagcggcgggagttttcttgctgcgataaaaaacagcagcatataaccgaaggcgatcaaaatggacaagagtgcactccctacggatgtcgcatcacctagtataaggccggaaacaacggacagatatacggcaaggaaaatatcttcaaacatgatgatgccgagaatcaattcggtttccggattggcggttctttttaaatcaacgagcacttttgcgacaatcgcacttgacgagattgtgatgacgcctgcgaggatgaggacttccagaaaggaaaatccggtgataaacccgtaaagcagtccgaggctgaagttaatcaaaatataaatcgtcccgccgaccgcgattgattttcctgatttgattaacttcccgacagagaattcgagtccgagatagaagaggaggaacagtacgcccattcgcccgaaaaactcgatgatttcactgctttgaataaatgttagatcaataatccccattttcggcgcgtgcggtccaacaagcattcccagcacaatcagaaacggaataatcgaaaatttaattttattggcgatcacactggcgattgccacaagcacaagtgcagttccgacttcaaatacaagatggtccatcggggctcacacgccctctccagaaagaaaatcgtgaatcagtttcttcagatgctttctctcacctgagaggacaagggtgtcattttcttcaataatcgaatccgctccgggatttaggagcttttcctggttgtgtttgataatcgcaataacagtgacatcgtaattctggcgaacatcaagctcaccgagtgtgcgtccgatcgatttggcgcctttttcgaccttaaaccattcaataataagatcgctgaaggccatttcgatggactccagagcttgcggtttatagaccatgcccccgagaatagctgcaatttgccttgcttcagaatcatccaatgaaatatttgaaagaagctcatccgggtcccggtcattaaaccggtaaatttcccttcttccgtcatcatgaatgataatcgtcattttttcgtggcttcttgtttcgatttcaaactttttgccgatgcccggcagatcgttttctttaatattcaatgaaaatccctccgaatgtagtgttggcagtatggggtgagttacaaataaaacttgagcaaattatattcggaggtaattagactggtatttgacagggacggcacaagccttttccagcctgtttatcagcggttcgtcaagtggtttgacagagagatgcctgacagactgtgccagcgggctgtactctttgatcagctcagccgggtgaatgctgcccggcgacggcgtttttgccgattgtgtttcctgcggatatgaggacataggcacatagctgtcagtgcttgcttcaaactgggaaggcagaaccacgtccgaagggggaaagtacaccataaataaacttaacagaaaactgatcagcaatttatccatgtcctttcctcccttctcatcaagatatcccttctttttcactatataaaactttatgtttccattcaaacaatatgcatttttcagtatctattgaccttgaaaaataaaaaggtttatttggggatggcggggaatgtataggagaaagaaaaaagtaagcgcatacatggaggtgcttttaatggagtttgttcaatatgcatgtaatggggccgttgcagagattatcctgaatcggcctgatgcccatcacgccctgaatgaacagatgctgtctgaattgaaggaggcagtcgaaatggcggctgcaagcgaggcgctcatcgttctcctgagaggaagcgggaaaggcttttcggccggcggtgatatcaggatgatgacgtcagagcatgaccctgaccaatttaaacggctgatggatacgattgaggctgtcaccctgaatttatatcagatgaagaaagtgacaattgcagccattcatggtgctgctgcgggactgggcctgagtttggcgctttgtacggacattgtgctcgctgaaaaaaacgccgttctcgcgatgaattttatcggcattgggcttgttccggacggcggaggacattatttgctgaagaaaagaatcggtgaagcaaaagcgaaaaaactgatttggagcggaaaaaaactatctgcctcggaagctgccgatatggggcttcttgatgggacatttgccggagaccctgccgaaggcgcaagacccattatcgaaaccctgttggcctcccctcttttggcgatgatcgaaacgaaaggtatttttcaaagcctccaaattgaagaactgaaaaaagtgctatcccttgagcgcagcgcccaagagagaatgagaaggaccaaggatcaccaagaaggaatccgtgcctttttagaaaaacgggagccgaagtttcaagcgtaacagatcagccggaaagctgatcatctgtgaaacaaaatcagctttccggctgcattgactaaacgatgagtatgactatgaagctctttttcttttaagagggcttcaccatgcgtttttgccgcttcttcatgttctgcctcgaattgctcgtttaccagcgtgttccccgaaggatcaaatacggtaaggaaataatcagccatcaggtttctcctccattttaaggtttatcagtctttcttcatttatattctaaaaaggaaatcaaaatcctttattatgctttatccaaaattagtatataatgggtcagggaaggaggagattcagtgcttacaattgatcacgtaacgaagacatttggagattataaagccgttgacggattggacttagatattccggaacagcaaatgttcggtctattaggcgcaaacggagcgggaaaaacaacaacgtttcgcatgatcctaggattattaagcattacggagggctcaatcagctggaagggccgtcctgtgaattatcatatcagcaacaaaatcggttatttgccggaagagcggggcctttatccgaaaatgaaggtaagggatcagctcgtctatcttgccagattaaaagggatggagaagcgagaggctgtaaaagagctcgggacatggcttgaacgcttcaatattacagattacgagaataagaaggtggaagagctttcgaaggggaatcagcagaaaatccaattcatttcggcagttttgcataagccggagctcctgattcttgatgaaccattcagcggcttggaccctgtcaatgttgagctgctaaaagaggccgtgatctcgctgaaaaacagcggtgtttctattttattttcaagccatcggatggaacatgtggaggagctttgtgagaacctttgcatattgcagaaaggaaaaccggttgtacaaggcaagctgaaggagatcaagcgttctttcggtaaaaagaatgttaccattcactccgatgacgatctgcgctttttgcagtcccatgaaggcattcttcaatggaaggaaacggcagacggcgtcaagctgcagattgccaatgaagacatttctcaagagatttttgcgatgctacagggaaaagggtttatcagaaagtttgagcttgaagagccgtcactgcatgatatttttatagaaaaggtgggggccgtctatgaataaattttggatcatgctttctcatacatacaaaaataagattatggcaaaatcctttattatttcgactgtcatcacggtgctgcttgttttagttgtaacgaatctggagtcgatcatttctttgtttcaaggtgacgatgcgaaagaaaaaatcgccgttgttgatgaaacaaacgaattatatccggttttttcaaagcagctgaaagcggtggatactgacggcgatcttgatgtgaaactgtcgaagcaatcggaggatgaggtcacaaagcaagtcaaagatgaatcactcgatggcatgctcatcatcaaacgagatgaaaaagggaccatttcaggaacatataaagcgttaacgatttctgatgaaagcacgtatcaaacactgcagcaggcgctgacgcaaaccaaaacagctgtcggaacagcggagctcggcgtgtcgcaggaaacgatcagcagcctttatgcgcctgttactgtggggcagaaggcgctgaaagaaggggcaaagtctgaggaagagcttggccagacggtagggcttgtttacattatgctgttcgtcatttatttctcggtgattatgtatgccagcatgatagcgatggaggtcgcaaccgaaaaatcttcgcgagttatggaaatcctgatctcaagtatgccgccgatccagcaaatgtttgcaaagctgcttggtatcgggcttgtcgggatcacacagcttgctattattataggagccggctctctgtcgcttaagctgaaccaaaagagcgaaacggcttcatctgtcggcggattccttaatttgaccaacgtatctgcaaccactgtcatctatgctgtcattttctttttgctcggatactttttgtacgcgacacttgccgcgtttcttggcagtgtcgtcagcagaatagaggacgtgcagcaaacgatcacgccgatgacgcttttggttgtcgccggttttatgatcgcgatgttcggtttgaatgcgcctgacgcaggatttattacggtaacttcgtttattccgttctttacgccaatgattatgttcctgcgcgtcggcatgcttgatattccgttctggcaggcggctgtcggaatcggaatcacactgctcaccattgtcatactggccgttatcggcgccagaatttataaaggcggtgtattaatttacggcaattcaagcgcgttcaaagcgatcaaacaagcgctacgtttagcgaaaaactgattggaaaacagcctggggattctcaggctgtttcttttttgacagaacgtgcattcgcaagaattcggtgctaaaataagggtacttcatcctggaaaggagcagaatgttgactgatctaacctttattcatgcggcagatcttcatcttgacagcccgttttacgggatatcgcacctgccggagccgatttttgcccggattaaagaaagcacgtttgcaagcgtgagacatatgatagacgccgcagtgagagagcacgttgatttcattttgctggcgggagatctgtttgatgaagccaatcgaagcttaaaggctcagctctttttgaaaaaacagtttgaaagactcagagagtgcggaatttcggtatatgtcatctttgggaatcacgatcatcttggcggggagtggacgccgattgaatggcctgagaatgtccatattttttcgtccgctgttccagaagaaaaatcatttttaaaagaaggcaggcgcatagcaagcatttacggcttcagctatcaagctagagcagtgacggaaaaccaagccgcccgctatcggagatcaactgacgcaccgtttcatatcggcatgctccacggcacgctctcaggatctgaaggacacgatccgtattgcccgtttacccatgacgatctcgtgaaaagcgggatggattattgggcgcttggccatatacataaacgccaggttctatctgcagagcatccggcagtcatttacccgggaaacacgcaagcacgccatatgaaggagacgggagataaaggctattatctcgttcatgtgacaaacggagatatatcttatgaatttcagagagcgcatgatgtcctgtgggaaaaagcggcggttgatgtgacggaggcaaataatatgaccgctctcttccaaatggtggaggacacgttttcgaagctgcggaaaaaggggagccctgtttgtgtaaggcttgttttacaagggacggcgccggaatggctgctggaggcgccaaaaggcaccttggatgagtttcttgaagctcttcaggaacaagaagcggaagaggaacatttcgtttggcctcttggattggacgatgagacagaaaacgaagcaaacctaacaaaccttgatcctttttttggcggtttatttgaagacattgatcgcagcgatctgtcagacgtgctggaagggcttgagcggcatccagtgtatagaaggcacgcggaccggtttagccaagaggaggtaaaggaaataaaagagcaggcacagatattattgaaaagacagcttaaggtgcttgatacatgaggcggtgacagctttgcgaattatatctttacatatctaccaatacggaaaattttccaatcggacctttgacttttccgcctctcctgtccaagtcatctacggattaaatgaggcaggaaaaacgacgatgatgtcattcattgaaagcatgctgttcggttttccgaaaacgaaaaagtatgaaccgaaaacaggcggtgtctacggcggtgttcttgaagctgaacatcctgagtatggggtgctgaagatcgaacggacgaaagggactgccgaaaaactaagcgtgtacacagaaaagggcgaagtaaagcagggagatgttttaaagcagctgttccagggcacagacaggtcgttgtacaaagccatatattcgttcgacgtattcgggctgcaggaaattcacgcctttaatcgggacaagataggggaatttttgctcttttccagcttgtttggtgctgaagccgtatcaaagcttgattcaaggctgacgaaggaaagcgaaaggctctataaaccaaatgggcgaaaccctcaattgaatcaggagctggaaacgcttaagcagctggcagttaagctaaaacaggctgaagcagaggaagcgggctatcatcagcttctcgaggaaaaacgaacgcttgaagcccgccttgcagccgcggaaaccgaattgaaagagacggcgggacatatccgaatgattgagggagcgattgagcgaaagccgctgctaaatgaaaaagcgacactcgaacaggtgattgcagaatttccggaacacgcaggacaatttcctgctgacggactgcatcagctggaaaaatatgaatcccatcttcacccgaaatcagcacagcttgaggcgcttcgggtgaagatggcggagttggacaaacagaggcaaaagcttatccccgataaagaactattggcgaaagaaacgctgatacaagagctttcggcagcgtttcatatgtaccaatcctggggagaacagctggcagccattcaggcacagctgcgccagacgtctgcgcagacagcggcagggctggaacagctcaataaaacggatgaaaatgagctcctgaatatgaacacctcatatgattatgaatggcagcttcagcaagcggtgcagcaatatgtacaggcaagagacagaaaacggcagcttgacgagacgtttgaacttgcccggcaagagctggaagacgcggaaaaggccgttcgtgccgcttcgtccgcgattcttgaaaacagccaaagaaaagataaagaagcagctcttagagcatatgatgaaacacaggggcagcaccaagagcaagcgaagctcagagaacagctaacgttttttgaaagacagcaggctaaacagaaaaagactgtcattgcagctggtatgttgttcatcgttctcttttctctgctgcagcaatggattcccgccataagtttcggcgctgcacttattgtgtattggcttgtttcaggaaagtcgtcttctcgaaacagccgagagacaagacagcccatgacggatatttcaccagcagaagctgaaatgcttagagaagcgttatgggaggatgaccgcaataagcagcaccttctcacacagcgtgcagcgctccagcaaaaagaggcggcgtatgaaagggtcatccagcagtttgaacagtgggaagccgaaatggcgccgtcctttacacaggttgagcgttttatgaatgagctcggatttaaggaagatccatcatttttgcttgatgcatacagcttaatgaaggatgttaaaaaagaagtgaagaaaaagcatgagctgaccatagaagcaggcaggctgaaaaagcaccggagaacattcgaagaacgcgtcagtatgcttcttcccgtgaatcagagtcaggatatctccatttcggacgcccttcacacattgcggaaaaacattgaacgtgaaaaagaaattgagaagcaaaaaaaggaaattgaaacagatattcattatacaaaggaacagatgcttgaacttgagcaagaaatacagtatttccacgcacagattgaacagttatttgccgcggctgctgcaaaagacagagatgcgttttttgccatagccgacatcagcaggcaattgaagggtacggagaacaagcttcatcacgtaaacgcacagcttcaaggcgggtacccggaggaacttgaactggcggattccaatacgctttctgaattgaaagataagcaatttgttgagaatgaaagaaaagagcggctgactgaggagatcgagcagctccgcagccaaatcgcactgctctcagtcaaacaggaacaattagaggcttcgggaatggtctcagacctcaagcttcaaaccgaaatgcaaaaagaacgtgtgaaagaaacggctaaaaaatgggcctccatacaaatggtcagacaggtgatcagaaacaaattggagcggcataaaaaaatcgagcttccgcgccttctagagacggcaggagaatttttccgccctctgactgacggaaactaccaaaccatttatttttccgaaacggatgattcgatcatggttatgcatcgcgatggaactgtctatcatgcggaagagctgtcacaagggacatgtgaacagctgtatacagcgatccgatttgctttggccgttacgcgccagggtgggtcaaagcttccgttccagcttgacgacagttttgttcattttgatcaggaaaggctgaaacgtgtattacatgttctgtatgatttatctgaaggcggtaggcagattttgtattttacatgccatgagcacgtaaaagatgcatttcatagcagccaaatcatccatttggtgtcataaaagaggttctatagctgaaaatcggtatgtgatatactggtattatgtaagatacggagggagctttaatagaatggctaaagggattatgctacatgaggttggcgaacaggtggaccagtatctattgattaaatcctcgacgaaagggattgcaagcaatggaaaaccgtttttgacgctgatgctgcaagaccagtcaggcgatattgaagcgaagctgtgggatgccaagcaaagtgatgaagtgacctatgcgccacagacgattgtcaaggtcgtcggcgatgttcaccattatcgcggacgcacccagctgaagctgagaaatatcagaccggtaagcgagcaagaaaacgtcaatattgatgattttttagaaaccgcgccgattccgaaaaatgaaatgatggacaccatcactcaatatatatttgaaatgaaaaatccgaatatccagcgaatcacaaggtttttggttaaaaaacacgaagctgagtttatggattatccggcggctacgaaaaaccaccatgagtttgtctcaggtttggcgtatcatgttgtctctatgctgaacctggcgaaagcaatagcagatttatatccgtctcttgatcgtgatctgctttacgccggtgttatcctgcatgatcttggaaaagtgaaggagctgtccggccctgtttccacttcgtacacggttgaaggcaatttgctcggccatatttcaatcatggtgacagagctttcaaaagcggctgaggagcttcaaatcgattctgaagaggtgttaattcttcagcatttgattttgagtcaccatggcaaagcagaatggggcagcccgaaaccgccgatggtgaaagaagcggaaattcttcactatatagacaatctggatgcaaaaatgaatatgatggacagagcgcttgagcgcgtgaagcctggcgagtatactgaacgtgtatttgcactggaaaaccgttccttttataaaccgacatttcataaataacttaaaaaggactgatgctgacatattcagctcagttctttttgatgcgtctttcccgcacataactcgtctcattcccgcatatggttaagaataaagaatctatgcaaagggggaggagcccgtgttattttttccgtggtgggtgtatctttgtattgtaggcattattttcagcgcatataaacttgtgacggcagccaaagaggaagaaaaagtagaccaggcttttattgaaaaagaagggcagatttatatggagaggatggaaaaggagcgagaacgccgcagttctcagcagcatgaagaagaaaatcaaaaccattccatcgcataaaaaaagctgtgcggctcaatgagcctgcacagcttttttattatttagaattgcttgaagatgaagaagtgctgttacttgttgaagatgtattaaatgtgtctttcagatctttatcttttacttcgatgtcagccttcttcatgactttttgaacagcttcctgaacggcattgctgtcatttagtttttgttcaagcacttcagatttcagttcttttttcatatcttcatattttccgcgttcttcagtctttttgatgatatggtagccaaattgtgttttcacaggattgctgacttcatttgttttcaacttgaatgcagcttttctgaatgtggaatccagttgttcgttatcttttgaaatccagccaagttcgccaccgtttgtagcagtggagtctgttgagtattctttcgcaagatcttcaaacttttcgccttttttcagctttttctctacttcttcagctgtctttttatcagcgacaacgatatggcttgcgcgaatctggccttttaagccttcccagtattctttaatttcatcatctgtaactttgatgttatctttagccgctttttgtgtcagcaattcatattttacttgttctttcaggtaatctttgccatattgcttttcgagggcagtatattgatcgccaagctgcgttttatattctttcagcttgttgtcaatttctttatccgaaactttatacttcttgtccaatactttttcttgcactagctgtgtcagtacgcttgcgccagctgttttcttcatgtttgtgtaaagctcgccttttgtgacatcgcctgcgtctgtttttgcgataacttctttgtcgccgctgctgcaagcactgagagcgaggatgcttgtagcagtgatagctgctattgcgattttcttcattgttttcaaacactcctaatcattccaaattaaattacctatgcgtatcataacatattgtggctttctgtaaaaagattttaaataaagggcattcgtctagtcaaacttttgctgatgacatacttatatattgatcaagaaaaggaggtatgtaacatgagcggaggatactctaacggattcgcgttgctcgtagtactgttcattttgcttatcatcgtaggtgcagcttacatctactaagcagcccgaggatcgcttgcaacataagcgatcctttattttcactagcgcctaatcgtttcaaacatgaattgcataacatgtaattggtaaataaagcttattacaggaggtgctttttaagatgggtgaagtatttgcaggcggattcgctttattggttgtgttatttattttattgattatcatcggcgcttcttggctgtactaatcaacataaaaaagcatagctgcttaatcagcagctatgctttctttcgtatttacactgtaaaggagatctccacaaacgaagagatcagtaaaattaatatagatacattaataaatcggaataccttatcttgccgctcttcaggaatctctctgacaaggcataatgtattggtgagcctgtttatgaaatataaaataaacacggcagccacgataaaatagaataaaatgatgggagattccccctctctctgaactgtcccatattacattaccaaatatttattaaaaaagatagaatgcaaattgaaaaatcgccaccagcaccagggtttgactacttttcaacaagaatatccaagccgtcagcttcctgatcaataaaagcggttttcggtgcttttatcagcttgagagccagcaggaaatcaggcagacagtagccggcgtgaatgcccgagatcatgcagaaataatgagcgtgattcggaaatgccagtgctgcgtaaaacaataccggtgtaatcagcaagaacgggctgacgagtgaaatcagcattgttgtttttggtatacgtttccatgtgcgcatgcgcaatatggaaaactttttttctatttttctttttttgcagatgattggcaggacatggatgactttatgtgcaaataaaataacgacgagcaaaccgccgaataaagatacatattcatcgcttaagcttgtgccaggccgcagcagctcaaaagctaaaaaggtagatataaaaaccaaaatcataaaacatacagcagttaatattatgcgaacggcgccataatccttcatgagatttatggtcttccagcaattcatcaaagtcatccttccatacatcttgaatagaatctcaaaataatttactcctcccaagagaaaaaatcaatgcttttttaagaaaaaatatcatccggcaggtatttttttgaaacaagcaaacaaactgcgaaatatggggttagaactttcttctcagtgaattatcagctaaaataagattaaagatagaaagaagtggtgtggatggattcgatggatcatcgcattgagcgattagaatattacatacaattattagtgaaaacagtagatatggacaggtaccccttctatgcgcttctcattgataaagggctgagcaaggaagaaggggaagcggttatgaggatatgcgacgaattgtcggaagagctggcaacacaaaaagcgcaaggatttgtaacctttgataagctccttgcgctttttgccggacagctgaatgaaaaattagatgttcatgaaacgatttttgccctgtatgagcaggggctttatcaagagctgatggaagtctttatcgacatcatgaagcattttgattaactgtttacaggttcaagctcttcagccggttcatccgccgcactgtcctttgcttttttcttcagttttccgtttacgctttcaaagtcattgtcaatattggtgagtgacgtttcgaaaatttccataaaatcatcgccgtagatatggcgtatcatacacatcatttctgccacttcaggaaattttccgaataaatgatacaaaggctgtgaccctttaaaaacagcgttgcgtgtcggatcaaattcctcaagcaagctccagaatacctcggtaccttcctcagtcaattggacatatgtgttccgtttatcattcagccgtttggagaaccttaaatatccccgttcttccagcttttttgaaaagttgaatgcggttgatacgtgcatgaccccgaacttcgcgatttcagaaatggaagctccattcaattgatacgcaatccataaaatatgatgctcattaatattcaggtcatacggtttgagccattgctgccaatccttctcgatcgatttccaaagagctttgctaagctgagccattttctgggtgaaaaccagagcttctttcacatcatagggcggttccactcgattcattacgtcacctgcttctctttttctttttctctattatgccaataaaataaagattaataaagatgaaaatgtaagaattttttaataaattcacaaaccattgcgacgaaagggtttttcggccaaaaaaaaatacgggtccaattttggcccgcatttttttcttttgaataggatattagttttgtaaggttttctccagctgtctgattttctcttcgatatcggcaatttctttttgcagatcctgctggtgaggcttgatctcttcctgccattttttaattgacgtttggagctcgccgcccacgtctttaataacatccgtgctttcttttgccgctttgatcagctggtcttttaatgcaagcccgtctgactttaagcgtttgattgtttcttcaaaagaatcataattggttttcattttttcacgcagctgctttcctgaggaaggtgcagtaagaagaaccgctgctcctccgatgatgccgcctacgaatagtcctgttaatagagaacgtccgctcgccattacaatcaccccgtctttttcttcaaaataggattcattcagcatttttcatttttgttgaaagcctgaacttctatacatagcttgctttattttagcatattttttaagtgaaaaggagggagaaggttgtctgtctttttgattgtattatcctgcatcacccttgccttcgcttcaggcgctgtttactatatcaaacttctcagccaggctgcttcttatccgcccaagagggttatccggcagaaagcgcttgtttgttcaaccggaaccgcctttacactatgtcttatctttttcacaaaactcctcgcttaaaacatgctgacatgctgcgggcgctctgttcaaaaaaacctctcccggaagcggaagaggttttgtgtgacaattatttagcagcttccataaagcttgaacgccttaaaatggtttgcacaatcggataaataatgatcattgagattgtattcagcacagcggccggcagaacaacagccgcgaacaatgcggcgaaaccgcccggtaaaccgacgatcaataaagctgacgatagaaacacaattcctgataagatggtcccgatcactgtcagcacagcggctgcacctgttttccggctctttctgaacaagagaaacagggagaagaacagaaacgctgatacgggtttatcaatgatgttagggatctgtccggctggaaacgcggttgtaagcgcggaaatgattccggtcacgatcccgatgacgagtacattttgcacccgcgggaacagcagaatgcccatgaacatcatgatcagcatcatatctggtttcatgccgcctaaaaagggcggaataatggaatgaagcgctgcgccgatagcggcaaacagagccataatgactaactcttttgttttcatatctatgctctcctctgctaagcttttgccctccaataatatgctcatcatttattgcgaaggctttacagaatgtgttatgcaaacagtataccaaacgaacggtttgcatagccagactttttactcattttcctgctggaatttcttcatgaacgcagctaatttttcacagtcttcgagagagaccgcgttataaatagaagcgcggcagcctcccaccgaacggtgtccgccaaggccgatcatcttcgcatcttttgctttctggacgaatgttttcgttaattcgtcatcccgaagcgtgaaggtgacattcatgcgtgagcggctgtcttttctggcatgtcctttatagaagccgttgctttcatcaatacagctgtagagaacctgcgctttttgttcattgcgctgttcagcagtttccacaccgccgttttccttgagccactccagaacaaggctcagcatataaatcgcaaatgtcggcggagtgttgtagagtgaatccgctttgacatgcgtggaatatttcaggatttttgggacgttcgcattttcatttttcagccagttttttttcatgatgactacagtcacgccggaagggccgaggttcttttgggcgcctccgtagatcacgtcaaatttagacacatcgatttttctgcttaaaatatcgctggacatgtcggctacgagcggaattggagaattcggaaactcctgccactgagtgccgaaaattgtattgttggatgtgatatgtaaatatgcgccgtcttttacatccgtaaggtcaacctctggaatatagctgtaattgtctgtttcacttgtagcggtgatagacgtgttcccgaacaatttcgtttctgccagtgctttttcagaccaagcgcctgtcatgacaaaatgtgcggttttttcaggtgttaaaaagttcatcggaagcattgagaattgaaggcttgccccgccttgaagaaacaagatatcgtaatcttccggaatgcccatcagttcgattaagaggcttttcgctttttggtgcaccgcttcatactctttgctgcggtgggaaagctccataatagacatgccggattcgttaaaatcaataaattctttctgtgctttttgcagaacttccagtggcagcgctgcaggacctgcgttaaaattcgttgtacgttccattatgatctctccctgttttccacgttaatgtataaaataatacaattatcctatcacaaaaattcagttttttgataaaaaattagaattatcaaaagaaattgacggatgtttgcgaaatgttcacaaaataaaataacctcatcttatgatgaggccaggcgttttgcgatagaggaagagatgttctgcagatcctccggtttataatcatcagcatgcgttttccaaaccgctccgaatccatctccttttccgtagcgagggataatatgcatatggtagtggaacacagattgtccagctttttcgccgttattgttcagcgtatttaagccgatcggttcaaattcatcccggatagcgcgggcgattttcggaacagcatggaaatattgttttgctaattcatctgtaaattcatatacattctcaatatgtgttttcggaatgacaagcgtatggccttttgtcacttggctgatatcaagaaaggcaagtacatgttcatcttcatacaccttcgcggatggaatgtcgccggcgataattttacaaaagatacaattttctgcacaatgcatgagggttcctccttatgaaattgtttagtatgtatacactcatcgtaccacagaaatgcagaaaatagaaaacaggatgaacggcgagcgttcaccctgaatgcagaggaagagcttatatgaagaaaatgtgttatgcctttggtaagcacctcatttgtcaataaaatgaagacttgtttaatgcctaacgattcctgcgataaacacctcatttgacaatttgcttcatacatgaagaattcatcaattcagtgaagagaaatggtttgagcattggacatgtttattttctatccaactgtttctaagacgtctttgacaaacacctcatttttcagttgatatgcttttcctctacaactattatgatgtccagaaccctgtctctttatgacagcaaattcatcatttgttaaaagggaattgtttcaaatcaggccttgtttttggtactatgaagaaaaacactataaggggagaaactatgtctctgctatcggtaaaagacttgaccggcggatatacaaggaatccggttttaaaaaacgtatcattcacccttgaaccgaatcaaattgtcggattaatcgggctgaatggtgctggtaaaagtacaacaatcagacacatcatcgggctgatggacccgcataaaggttcaatcgaattaaacggtaaaacgtttgctgaggatccggaaggctaccgttcacaatttacctatatacctgaaacacctgttttatacgaagaattgacgctgatggagcatcttgaactaacagccatggcatatggactgtcaaaagaaacgatggagaaaaggctgcctccgctactaaaggaattccgaatggaaaagaggctgaagtggttcccggcccatttttctaaaggaatgaagcagaaggttatgattatgtgcgcatttttggcagagcctgcgctctacattattgatgagccttttctagggcttgatccgcttgccattaacgcgctgcttgaacggatgaatgaagcgaaaaaaggcggggcgagcgtgctgatgtcaacacacattttggcaacggcagaacgctattgcgattcgtttattattttacataacggcgaggtgcgggctcgcggcacgctgtcagagctcagagagcagtttggaatgaaggacgcggcgctggacgatttgtatcttgagcttacaaaggaagacgctggccatgaataatatgcttgatatttggcagtcgcggctgcaggagcatatcaaagaaacaagaacatacatgaaatatatgctcaatgatcacctcgtcattgttttgattttttttctagcgggcgctgcaagctggtacagcaaatggatacgggacattcccgctcactttccatccttttgggtgatggccgtgctgttttcgctcgtgttgacaagctcttatgtgcgaacgcttttgaaggaggctgaccttgttttcttattgcctcttgaagcaaaaatggagccttacttgaagcaggcgtttgtctacagctatgtgtctcagctgtttccgcttattgcgctgagcatcgttgcgatgccgctttatttcgcagtcacaccgggggcttcgctcgtatcgtatgccgcggtctttgtccaactgttgctgctgaaagcgtggaatcaggtaatggaatggcgaacgactttccaaaacgaccgcagcatgaaacggatggacgtcatcattcgctttgcggcgaatacactcgttctttattttgttttccaatctgtttatatgtatgcgcttctcgtctatgtcattatggctgtcctttatctgtatatgtcttccgcagcaaaacggaaaacatttaaatgggaaagccatattgagtccgaattgagacgaaagcagcgtttctatcggattgccaacctgtttactgatgtgccgcatttgcgaaagcaagccaaacgcagagcttatctcgactttttgctgcggcttgtgccgtttgaacagcgcaaaacatttgcctatatgttcacccgcgcctttttgcgttcgagtgattatttgggcattcttgtcagattaacgatcgttttcgcgctgatcattatgtatgtctcagctagcccgttgattacagcggttttgactgtgtttgccattttcattacgggcattcagcttctgccgctcttcggccactttgaccatctggcgcttcaagagctgtaccctgtgaaaaaagaaacaaagctgaaaagctatttctctctattaaaaactgcacttagtattcaagcgctgctgatgtctgttgcatctgcctatgcagccggcttgaccggttttctgtacgcgctgatcggttctgccgttctgatttttgttgttttgcctgcttatatgacaaccaggctgaaaaagcacggaaagctgtgaactgaaaagaggtaatcaaatgacagataatcagctgctgatgcaggaagctttggaatggaaaatgcattttttgcgaaaggattccatgtttgaacgcttttcgaagcgtgtgcagacgaaggtgaatgaacggattcctgaaaaaatccatacggtcgtcaccgagagtgtgaaaaaaatggtagaagcgacaatgaccggctccaatatcatcacttataaaaaggatacaagtgcactgtcgctcagtgaaaaaaatgaattggcgaaaaaaacgattgtttcttatcagaaagtgggagctgctgagggagtcggcaccggagcgggcggcatttttttaggcattgctgattttccgctgctgctttcaattaagatgaagtgtttatttaccttgtcttccatttacggctttgatgtgaaagatgcacaagaaagaatgttcttgctgctcgtgtttcagcttgcgttttcgagtgatgatggccgtaaatcgcttttttctgtcatcgaaaattgggagacggagaaaaagagcatcgactggagagtgttccagcaggaatatcgcgattatatcgacgtcgtgaagctttttcagcttttgccgggcgtaggagcggcagtcggcggaattgccaattataagctgcttgctcagcttggagaaacggcaagacatgtttttcatctgaggatattaaaggaaacagccggagaataaacactccggctgtttttttatagctgatgataggtgatcgcagcgccggcaaggaccttggccgctgtcagcatggctttttcgttgatatcaaatttcggatggtggtgggaataaactcggtctggctgttcgggagcggcacctgtaaagaaaaaagtgcctttcacgttttgtaagtaataagcaaaatcctcgccgcccatttgcggttcaccttcaatgacctgctgaacgccctcggtattctttgcggtgctcaccaagtggctcgtttcggcaggatggttcacaaccgccggataaccctgttcataggtgtactcataggacgcgccgtgcatgctgcatattccttttacaaccgctttaatttctttctccagaatgtcccggacattttcatcaaaagaacgtgctgtgccgatgagtactgcttggtctgcgatgacattaaacggattgtctgcgatgaaggaacctgtcgaaatgacggcggattgaatcggattgactttgcggctgacaatgtgctgcaaagaggtaacgatttgagaaccgattaggacggcgtctttagtatcatgcggatgagcgccgtggccgccctttccgaagactttaatcgtaaatcggtctgccgccgccattacggcaccggggcggcaaagaatggttccgagcggctcagttgcccaaagatgagtgccgaatatcacatccgcgttttcgagacagccgtcatcaatcattggctttgcgcctcccggataatattcttctgcatgctggtggatcatcacaaatgttcccttcagttcatgtctgttttggtgaaggaccttggccactgcgagaagagctgcggtgtggccgtcgtggccgcatgcatgcatgacaccaggcactttggaggcgtaagggacatctttttcatcttgaatggggagagcgtcaaagtcggccctcaaagcgactgtagggccgggttcgcttccttctatatatgctaaaacccctctgccgccaacgtttgtgcggattgggactcctaacgattcataataggaagcaataaatgcggcggttttttcttcttgaaatgagagctcaggatacatatgaaaatggcgcctgatctcaaccatttcttcaaaacagccgtcgagctgtttgtttatctctttctgcagtgtggatatggacaaagccgcttcccccttttctatgttttccatgattgtatataaaaagtctgaatatttcaactcatgctgttttaaagcatcatcacagctgcgagggttgtcaccaaaaggccaatcgcgacgggaatgaagttttttctggcaagctcaaaaggatcaactttgcaaatggccgcggcgggaatcagcgcccatgggactagtgttcctccgcccacccagatggcagagatttgtccgagcgcggtcagaacggcgggatcggcatggagagcggacgaaaagagctttgcgatggagccggcgagagaaatgccagaaaatcctgagccgtcaaggcctgttatggctccagcggcagttaatgcagcggcggcaagctcctttgacataggcatcatatgggataaagcaatgccgagatcgttgacaatgccgtgggaacctttagggagtgaagtgcccagtatgctctcatagcctgagtcgccaagataaaagaaagcggcaatcgggatgacggggccgaaaaccttaaaaccgaatttaaatccgtcaataaaatagccggtgattttttcaagccctttatgcttatacacgaaaaaatgaacggtaaggaggatacagattgcagacccgccaattaacgcggtggcatcatttccttgtaggttaaacaagagcatacaggcgatatctgcaagaaaggcaagcggaatcaaaaaagccagtatggaccgcaggcgttttggtaagtacagcgagttgtcttgttcgccggaaagaacgggggaaaaagaagcgggatgctcctgttttttgcgttcgcgctgaatcatgataaaggcagctgttgttgttgtcacacccataatcagcacaagcggaatgctggccgagacgacatcaccgactggaatgcctgctgcatccgcagtcagctttggcgccgcctgaatgacaaagtctcctgacagggcaaaaccgtgtccgaataagttcatggccatggccgcggcaagaggcgtcaaaccggcacgtgcggctgcggggagcaggacggcgccgatcaaagcgacacccggagaaggccagaagaagagagaaatggcgaacatcaggcctccaatcagccaataggcagtcacaggccctctcacaaggcttgcaaagggagaaatcatcgcttcatttatccctgtttttgttaacaaatcactcattgaaacgataaagcaaatgatgaaaatcgtgggcagcagttcgccggccgcatagataaagctgtggaataaactgctgacagaagctgaaagtgaatggctggcccatagcgatatgataaaaatgccgaatagagaaataaatgtcgtgtcttttctcagcagcataaataggataattactccgataaaaaacacatacagaacatggacagacaaaatcccgacttccatcatcgatcactccttccgcttacagattattcataggcgggcggaaggtgccgggacagaggggagggttatgatggaagatgaacattgatctgtttcagctgctcatcagatgatgccttaatactctattcgctttttgcagatgttttgggaagcattcaggagaaaaaatgacgcacccttcagcaaaccagttttttctataggcgatgatgctttccgatggctctaaatatgaatcatcctcgtgctgcatctcgtaatcatcaaatccgaactgaaaaccgcagcacgggcagatttcatgagaatgattgccttcatgatcatatggcggttcagtcaatcccttaaacccgcagactgggcaagtatgcttcattttgctttcctcccaataaaataagctgccggacatgccggcagctattcgacagcgaaatatgtggtgacataggaaggccgggagaagatcgacgttgtgtcaattccggcagatgtatcgcgttttttgtgggcttctttgtaagaaccggactgctgccagtcttgaaaggcgctttccgtttcccacaaggtcagaatgacataggtgtcactgtcaagcggacggagcactcgaattgcttcaaagccaggctcgttttcgacttttcccgctctgtttttaaatctgttttcaaacagcggacgtccttcctgagtgacggcaatattgttcaatactgcaaaaccgggatgtttgatctctccgacttggtcaatgacttcataagcgtgtggtgcctggaaaacggtatctccgtttgtttcatgaatcaaaatggcgttttcctgcccctgcatcaaaaggatattttctgagggatgcttttctacgatcgtttttaaaaaatcggctgtcccatatgtaatataaaccttcatatcagccacctcctgcttgctagtatatcaaaacaatggtataagtttctattggcgagtgcttcgaacataattccaaacaatttttcccatactacctttagaaaggcgaggtgagttcatgtttaagataaagaaaaagaaactttttatacctatcattattttagtgttaactgcttttctcgctttaataggatatatttcaattatttttctcggccattatgtcatagatgaaaagaagctgatacttcatgcttcttcaaaaattgttgatcaaaacggagatgaggttgcaagcctgtatacagaaaatcgtgagccggtctctatcaatgagattccaaagcaggtcagagaagcgtttatcgctgttgaggataaaaggttctatgagcatcacggcattgatgcaaaatctgtcggaagggcagtgtatcgcgatatattagcaggcggaaaggtggaaggcggaagcacgatcacccagcagcttgccaaaaatatttttctgacacatgacaaaacgtttctaagaaaaacaaaagaagtgatcattgcgattaatcttgaacgggattacagcaaggacaagctgcttgaaatgtatttaaatcagctttacttcggacatggggtttacggcatacaagcggcgtcccactattattttaataaagaagtaaaagatttgactgtatctgaaggcgctgttttggccgctattccgaaggcgccttctacgtactctccaattttgcaccctgataaaaataaggagcggcgtgatacaattctaggtatgatgaatgaccaaggctatatcagtgcgaaagaggctgtcaccgcacagggccgaacgcttggactgcacgtgaagaaacagtcggaaaccccttggtttgacagctacattgaccttgtgatcaaagaggcggaagacaagtattccatttccggagagcagcttcttcaaggcggatacacgatcaaggtgccgctcgattcgaagctgcagaagacggcttaccaggtgatgaaagagggaagctattatcccggaacagatcagaatgccgagggaagcgcggtatttattaataacaagacaggcggtgtagaagcggccatcggcggaagggattacacatccaaaggatataaccgtgtcacagctgtccgccagccgggttccacatttaagccgcttgctgtatacggaccggcgatgcaggaaaagaaatttaagccatattctctattgaaggatgagttgcagtcctacggagattatacgccgaaaaactacgacagcatgtatgagggcgaagtcactatgtctgacgccattacgtacagcaaaaacgcgccggctgtctggacgctgaatgagatcggcgtcgaaacaggaaaatcttatttgaaagcaaacggcattgatatccctgatgaaggccttgctctcgctctaggaggcttggaaaaaggcgtttcgccgctccagcttgccggcgcgtttcatacatttgccgcgaatggaacgtatactgaacccttctttatctcgagcataatagatgaagacggagaaacaatagccgattataaagaagaaggaaagcgggttttcaacaagcagacgtcttggaatatgacgagaatgctgcagcaggtagtcaaaaagggaacggccacgtccggcacctatcacggcgacctggcgggaaaaacaggctctacatcttatacaggcgtctccggcgcgacaaaggacgcctggtttgcaggctatacgccgaaaataaccggggcagtctggatgggctatgacaaaacggatcaaaaccattatttgaaagccgggagctcatacccgacgcggctgtttaaggatattttgacacaggcaggagaaaccggtcatgtgttcacaaagcctaaaaacgttaaagacctggaaagcccgattgagctgaagccggtcaaaacactcacagccgattacacatttaaagcagcggggctctttactattgaattaaagtgggacgctcaagaggatgatcgggccgtatacagaatttatgtaaacaaggacggcgaggagacgcttcttgattcggttgaagggaagggaagctatgaaattccttatgccaacttattttcgggcgcgtcttataaaattgtgccttataatacacagacaaaaagagaaggggaaggaaccgattacgttcagccgaaattgttttcctcttaatggaattcggcgattttttgaactttgagctacatttctataccatttgcctaaaacaaggtatagtgtaataagtcaagaaatacgaacgtatggttgccgtatgaaaggtggaaatcagatgagtaaacgagaaacgtttaacgagacgtttttaaaagctgcgcggggagaaaaagcggatcacacgcctgtgtggtatatgagacaagcagggcgctcacagccggaatatcgcaagctgaaggaaaagtacggattgtttgagatcacacatcagcccgaactttgtgcgtatgtcacaagactgccggttgagcaatacggagtcgatgctgcaatcctttataaagatatcatgacgccgctgccgtcaatcggtgtggatgttgaaatcaaaaacgggatcggtcctgtgattgatcagccaatccggtctctggcggacattgaaaaactcggccagattgatccggaacaggacgtgccgtacgtgcttgagacgattaaactgcttgtcaatgagcagctgaacgtcccgctcatcggtttctcaggtgcgccttttacgcttgcaagctatatgatcgaaggcggcccgtcgaaaaactacaataaaacaaaagccttcatgtacagcatgccagatgcatggaatctgctgatgtccaagcttgccgacatgatcatcgtgtacgtgaaagcgcagattaaggcaggcgcaaaagcgattcaaatctttgattcgtgggtcggcgcattgaatcaggcagattacagaacatacatcaaacttgtgatgaaccggatcttttcagagctcgcaaaggagaatgtgccgctgatcatgtttggcgttggcgcaagccatcttgcaggtgattggcatgaccttcctctcgatgttgtcgggcttgactggagactcggcattgatgaagccagatcaaaaggaattactaaaacagtgcagggcaacctggacccgtccattttgcttgcgccatgggaagtcattgagcagaaaacgaaggaaatacttgatcagggtatggagtcagacggcttcattttcaatcttggccatggggtatttcctgatgtcagtcccgaggttttgaaaaaactgacagcatttgtccatgaatattcacaaaacaaaaaaatgggtcaatattcctaagcatatcttttggtatcttaatgatatcctgtcaaaatgtttgtatcagatcattaaagagggtgtaaacagtgagtagaaagaaaatggggcttctcgtgatggcgtacggcacgccttataaggaagaagatattgaacgttattatacacatatcagaagaggcagaaagcctgaacctgaaatgcttcaagatttgaaagacagatacgaagcgattggcggcatttcaccgcttgcccaaatcacagaacagcaggcgcataatctggaacagcacttgaatgaaattcaggatgagattatgtttaaagcgtatatcggactgaagcatatcgagccgtttattgaagacgccgtagcagagatgcataaggatggcattacagaagcagtcagcatcgtgctggcgccgcatttctccacgttcagcgttcagtcctacaacaaacgcgccaaagaagaggctgaaaaactcggcggcttaacgattacgtcagttgaaagctggtacgatgaaccgaagttcgtgaaatattgggttgaccgagtgaaggaaacatatgcgtcaatgcctgaggatgaaagagaaaacgcaatgctcatcgtatccgcacacagcctgccggaaaaaatcaaagaatttggagacccgtacccggaccagcttcatgaatcggcgaaattaattgctgaaggcgcaggcgtttccgaatatgctgtcggctggcaaagtgaagggaacacgcctgatccttggctcggacccgatgttcaggatttaacacgtgatttattcgaacaaaaaggctatcaagcatttgtatatgttcctgttgggtttgtcgcggatcacttagaagtgctttatgataatgattatgaatgcaaagtggttactgacgatatcggcgcaagctattaccggccggaaatgccaaatgccaagcctgaatttattgatgctttggcaacagtcgtattaaaaaaattaggacgttaaagaaggcgatgaacatgagtgacggcaaaaaacatgtagtcatcatcggcggcggcattaccggtttagccgccgccttctatatggaaaaagaaatcaaagaaaagaatctgccgcttgagctgacacttgttgaggcaagtccgagagtcggcgggaaaatccagactgtcaagaaagacggctatatcatcgaaagagggccagactcatttctggaacgaaagaaaagcgccccgcagcttgttaaagacttaggtcttgagcatttgcttgtcaacaatgcgaccggacaatcctatgtgcttgtaaaccgcaccctgcatccaatgccgaagggcgctgtaatggggataccgacaaaaattgcgccgtttgtttctacgggtctgttttctttgtctgggaaggccagagctgcaatggatttcatcctgcctgcgagcaaaacaaaggatgatcagtcattgggagaattcttccgcagacgtgtcggagatgaagtggtcgagaacttaatcgagccgcttctatcagggatctacgcaggcgacattgacaagctcagcctgatgtcgacatttccgcaattttaccagacggaacaaaagcatagaagcctgattctcggcatgaaaaaaacaaggcctcaaggctcaggccagcagctgacggcaaaaaaacaagggcagttccagactctgtcaaccggtttgcagacccttgtagaagagatcgaaaagcagttaaagctgacgaaggtgtataaaggcacaaaagtgaccaaactcagccatagcggctctggctattcgctcgaactggataacggcgtcacacttgatgctgattcagtaattgtgactgctccgcataaagcggctgcgggaatgctttctgagcttcctgccatttctcatttgaaaaatatgcactccacatccgtggcaaacgtcgctttaggtttccctgaaggctccgtccaaatggagcatgagggcacgggttttgtcatttcaagaaacagtgactttgcgatcacagcctgtacgtggacgaataaaaaatggccgcacgcagcgccggaaggcaaaacgctgcttcgggcatatgtcggaaaagctggagacgaatccattgtcgatctatcagataatgacattatcaacattgtgttagaagacttaaagaaagtcatgaacataaacggcgagccggaaatgacatgtgtcacccgatggcatgaaagcatgccgcagtaccatgtcggccataagcagcgtatcaaggagctgcgtgaagcacttgcatctgcgtatccgggtgtttatatgacaggcgcttctttcgaaggtgtcggcattcccgactgcattgatcaaggaaaagctgccgtgtctgacgcgcttacctatttattcagctaaaacctccgctttatcgcggaggtttttttgatgtgcaatggcaatattgtgtaaaaaaatgattgaattgaacggcaggttatgatacatttgcatatgtacttaatgactaaaatgttcaaacggtcagtttcgaggtgaatacaatgtcaatagatcgaaaaaagctcattttggaggcggctacaaagtctttcacgcagttcgggtataaagcgacgacaatggatcttgtcgcaaaacttgcgaacgtggggaagggaaccatttatacttttttcaaaaacaaagaagagctgtttgacgagattttcactactttattaaaggaaatgaaacaaaaagcggatgaagcgatggagccgaaccttccgttccatgaaaatgtgcacagagcgctgtttgccattctggagttcaggaaaacacatcagctgacgattaaaattttccaagagaatgccgagattggtacaatggctgttcaggaagtgatccagaaaatggagcgagccatactgtcttatatcaaaagtaagattgaagacgggatcaaaagcggcgcaatcaagccgtgcgaccctgaactgacagcctttgtgatgctgaagctttatatcgcgctcatttttgactgggaaaaacaacaccccccgcttgataaagagacaattgcgggactgcttgaattgtatgttgtcaaaggattgtcagcgaactagataatcctttctctttgcaagaaaatgaccatttttcatgatgagtcagttttagaatggaggcatcaggatgaacacaatacgaagtcagtggaaagacatcgtaacaagtaaaaaattattgattcccatcatcgccattttgtttgtcccgcttatttacagcggcgtattcttaaaggcttattgggacccgtacggcacagttgaccagctgcctgtcgttgtcgtcaaccaagacaagggagcaacgtatgaaggagaaaaacttcaaatcggtgatgatctggtcaaagaattaaaggataataacaactttgattggcatttttccaatgatctcgaccaatcgttaaaggacttattgaatcaaaaatattatttagttgtcgagattcctgaggatttttctaagaatgccagcactgtattagacaaaaatccgaaaaaattggatctgaaataccatacaaatgcaggttctaactatgtaggggcaacgatcggcgaaaaagcgattgataaactgaaagcctctgtttcaaaagaagtgaccgagcaatatacgaaagttatttttgataactttaaagatatcgcaaaaggtttgagcgacgcgagcagcggcgcgaaaaaaattgatgacggcacaaaggatgcgaaaaacggaagcgcccagctgaaagaaaatctggcgaagctgaaggaaagcaccgctaccatcagtgacaaaacagcgcagcttgcagatggagcggctcaggtgacgagcggcatccaatcgcttgacagctcgctcggtaaattccaggacagcagcaaccagatttatgataaatctggccagcttgcagcaggatcaggcaagataacgggcaagctgaatgaactgaatgccggccttcaaaaggtgcagcagggcttgcctaatctgacaaacgggctggatcagctaaacagtaaagcgcaagaaggttctgagaaagcatcaaaagcggaaaaacttataaatgcgctcgatttaacgaagcttgaaacagctgtgaataacctcgaaaagtcagaaacagcgatgaatgaatttaaaaaacagctgtctgactttgaaaacagcttaaaaaaccgtgatcaggcatttaaaaatatcatcaactccagtgatttcttaacagcggagcaaaagagccagctgatcagctctgttgaaaagcagcttccgaaagttgatgcgcctgattttgatgaaattttaagtgggcttccttcagctgatcagctgcctgacatcgcaacgataaaaagctcattggaagatgtgaaagcgcaggttgcccaggtgaaggcattgccggaagctacctctaaactttataacggcgcaaaagccactcaagacgcgattgacaaattaactgctggatctgagaaattatacaatgcgtcacagcaggtgacagatggccaaactaaactgacagccggcatcggtgaatataataagcagttcgcaaaggcaaaagcgggctcagagcaattggtgacaggaagcagccaagtatccggcggattgtttaagctgttagacgggtctaaacaggtccaaagcggatcatcaaaacttgcagacggatctgcatcacttgatacaggtttaggcaagctgttggacggcacaggagagctgtctagtaagctgaaggatgcggctgaccaaacaggagatatcgatgctgatgatcaaacatacggcatgtttgcggatccggttaaaaccaaagatgatgccattcattccgttcctaactatggaacagggctgacaccttatatcctgtcaatgggcttatatgtcggcggcatcatgctgacggttgtcttcccgctgaaggaagcgtcagggcgtccgagaaatggttttgagtggttcttcagcaaattcaatgtcatgatgcttgtaggaatcattcaatcattgattgtggcgacggttcttctattgggaattggtctcgaggtagagagcacgtggagattttacgtgtttacgatcattacgagtctagcttttctagcgataattcaatttttggctacaacgatgggcaacccgggacgatttatcgcagtcattattttagtgctgcagctgggagcgagcggaggaaccttcccgttggaattgcttccgcatttctatcaggtcatccatggcgcattgccgatgacctacagcattaacggattcagagcagtcatttcaaacggtgactttggctacatgtggcagatggccggcgtcttaatcggcatcgccctcgtcatgattgcactaagcattacttactttacaatgttaagccggaaggaagaaacatcagaagaacagccggcttcataaagaaaaagaacttgtttccttggaaacaagttctttttttgttacattccccatttaataagcaatcctgtataggttaatccgccgccaaacccgaaaagcaaaacgatttgatcttttttcagcttcccggctttcactgcgagatcaagcgccaaaacaattgaaaccgaagatgtgtttccgtagtgctcaacactagtgagcgttttttcaatcgggaacggtgttttttcacaaattgactcgatcatgcgcaagttcgcgctgtgaggaacaaaccaatcgagatcatcagagctgagtcctgctttatgtaaaagccgttcaaattcgccagggacagttcttgcggcccatttatatacctcgcgtccgttttgcaccatttttccagaaccgacaagctgcacaccgtttatttcatttcgcagtccggcacgatacaaaatatcgccgccgttcccgcttgttccttgtacagacgcaagaaatcccggcgtttcttcatctcgttctactaacagcgcacccgcggcatcgccgaacagtacgcatgtcgttcgatcggtataatcggttacctttgataacgtctctccggcgatgacgagaattttttgatgaaggccagatgtgatcaatccatttgccaaatggaggccgtatgtcagcccggcgcatgtcgcattaatatccagcgcgccggtgctttcccagccgaaatattcctgtacgcggcatgccgtactcggaaaggcgtaatcggatgtggttgtggcaacgaggatcatatcgacatcatcaagcgttcctttataacggctcttgagattcttcaccgcttctatgcataaatcagaggtaaattgatgttcatccgcaatccggcgttctctcattcctgtgcgctgaacgatccattcatcagaggtatcaacgatcttttctaaatctgcattggttaaacgtctgctcggcgcataggtgccgatagctgtaatttttgcttttgacatatgaatcactccttatggtcagattataacactagatattagtatctggtactaaaaagaaggtttttttacaaaaaaagagaagtgtagataggaatctatgaaaaagaaaaaggaggctgaaaaatggtcagtcaagaagcagtagtctttttggcattatccggggctattgcgtttctgttgccaatcgggctgattgtatggtttaagcgaaagtatggtgcctcgcttaaagtgttttttattggcgctctcacgttttttgtcttcgctcagctgctggaaggcggcgttcatgtttatgtactgcaagtgaatgaaatgacgaaagaagcgatgcagcatccattatggtatggcatttacggctgcttgatggccggaatttttgaggagtgcggaaggtatatgatgatgcgattttttatgaagcgccatcatacttgggcggatggtctggctttcggggcaggccatggcgggcttgaagccatcctgattacaggcttgtcctctatctcacttattgtatacgcatttgcaatcaatagcgggacgtttgaacagcttttggtcaatggcgacgtcaaacaggcgcttttgccgatacaggagcagctgctgcatactccttcgtatgaatggatgctgggcggaatagaaagaatcagtgccattgccgtccaaattgggctgtctctgcttgttttgtacgcggttaaaagccgccggccgctgtttttgttgtattctattcttttacatgcactgtttaatgtaccggcggttttatatcagagaggaatcatagagcatgctgctgctgttgaaatcattgttgctcttatagcggctttatcagtttattggattgtaaaagcaaaaagggtgtttcaataaaaggtccaagcagcagcaatgcccgcttggaaaaatgtgaatggaaatattcattaagcgtgggtcatcagaatatttctgattcagtctttagcaatgacagcaagaatgtctgtgttttttacaagagaaacaatggtgtttctttttcttcttctcgcaagggtcatggcattctttctttttcttgcaatggtcgtggaaatctttatcgaaccactcgtcaaagaaccaaaaatcatcgaaccaatcgtgacaacgacatttctgttcatgtgaatgacgacagcacatagaaatccctcctcttcccatgctctctacagcatatgagagattgataggaaaagattggacgggtccctcgggaaaagagtatattttaagtagaaaataaaaggaggaatgccctatgacgtccgtacgtaaaacgatggagctcattaaagaacttgtatcgatcccaagcccgaccggaaatacatatgaggtgatcaattatattgaaagccttttaaaagaatggaaggtagaaacggttcggaaccacaagggcggcttaattgcaacgcttccaggacgcgacacatcccggcatcgcatgctgactgcgcacgttgacaccctcggcgctatggtgaaggaaattaaagcggacggccggctgaaaatcgatttaatcggcgggttccgctacaactcgattgagggagagtattgccaaattgaaaccgcctcaggaaaaacgtacacaggcacaatcttaatgcatcaaacgtctgtgcacgtatacaaagacgcgggaaaggctgagcggaatcaagagaatatggagatccgcctagatgaacctgttcactgccggaaagatacggaggagcttggcattggcgtcggagactttgtgtcgtttgatccacgtgtcgagatcacatcaagcggatttattaaatcgcgccatttggatgacaaagcaagcgtcgccttattgctccgcttaattcatgaaattcaaacagaagacattgagctgccgtatacaacccattttcttatttccaataatgaagaaatcggttacggcgggaattcgaatattcctcctgaaacagttgaatatttggcggttgatatgggcgctatcggtgacgggcaggcgacagatgaatattcagtatcaatctgtgtgaaggatgcgagcgggccgtatcattatcagctcagaaagcatttagttcaattagccgagaagcatcatattgactataagcttgatatatatccgtactacgggtctgatgcgtcagcagcgatcaaatccgggcatgatattgtgcatggcctcatagggccgggaattgacgcttcccatgcatttgaacgcacccataaatcatctcttcgccataccgctaagcttctgtattactatgtacagtcaccaatggtataagggggaggaccaatgaagatttataagctgaaaagcacattcggttgggaaggtgatgacgggttgggagaacagctgattcagcagatccttgccggagaaaaaaacgccacgtgcgcgccgaaatcattgtattcaaaagatgaattgagggacgtttatcaaacagcgggtcagcttgttaccgtttatgataaacatgacaatccaagatgcaatataaaagtaacagatgtctttgaaaccacctttggtgcgcctgatatgaggttagtcaaaggagagggcaatggagaccgaattgaggagtttcaagaggatcatcggatggcatgggcggaactgatcaaaagcggtgaactggagctgaatgaggatactgttttgattacagagttgtttgtgcttgttaaagattaaaaaagcctgcggggcaagaaccccgcaggcttttcattaaccagaaatggttgcgttttgttctgttttcgattgggacataacagtttctgctttcgcaggattaaacatgccttcccatttagacatcacaacggcagcaagcgcgttaccagtcaggttgacaactgtacgtgccatatccatgatgcggtctacgccggcaataaaggcaagtccttcagccggaacgccgatggtgccaagcgttgcaagcaagacaacaaaagaagtaccaggcacggcagccatccctttagatgtcaccattaagacgagcacaagcgtaatttggtgccaaatcgtcaaatcaatgccatatacctgtgctaaaaagagtgcggcaatagattgatagagaacggaaccgtctaagttaaacgtgtaaccgatcggaatgacaaatgaaacaatgccttttggacatccgattttctccattttttccatgatacgaggaagaaccgtttcagagctggacgtactgaacgccagtaagatttcgtccttcatgtaagcaaggaacttgaagatgctgatgccggcaatttttgcgacaatcccgaaaataacaattaagaagaaagcaagcgcgacataaaccaatccgacaagctttccgagagagataagagaaccgagtccgaatttagacacagtcactccgataagagcgaaaacgccgaatggcgccactttcatcacaaggtttacaacgtggaacatggcatgggatacaccttcaaaaaaggctaatacaggcttgcctctttcaccgatcgcggaaatacccaatgcaaatagtactgtaaagcagatgatggctagaagatccccttcgaccaatgactggaagaagtttgtcggcacaatatggaggaacgtttccgccactgatttattactttgttctttttcagtttcaacatattgactgatgtccgatttttgagcttcgtgtatattaactcctgtacccggatggaagatgtttgcaagggctagtccgagaataatggcaaaagtcgtgatgatctcgaagtacagaatcgttctgaagcctaatttaccgacttgctttccatttcctgcaccggctacaccgatgattaagctggagacaacaataggaatcactatcattttgattaagcgtaaaaagagatccccgattggctgcaggtaagtaggcaatgctgggttgccataccaaatgacgccaacaatgacacctagaataagtccaacgaatatttgtgtggctaatccaaacttaattcttttcatagattacctcccaaaaaacaaagtatcaacatatatcatgaatagacatatatttaatctcactattagatcaaattataatagataagaaatcaattcgtctatagtaaattatatttcgaaaataaagaatattcaatgacattatgataatcaccagaattatctaaaaacaggtgagctttgacctaacctgactattatttcaaaattaagagatatgtgaaaaaataagaaaatcccacgcgtaaggcgcgggattttcgctcattacaaatcgtttacttttatacagtcattgcagatattaccataacactcatgctgctcttctatcttttttccgcattccgcacactttttcgaaggcaggtttctaaaaaattctgtgattttccccagcataaccaatccctctttcccctttgtagtgatttcattgtaatataacagatcgcaaaaatcaataactgttttgatacaatgtttaaaacatgcttttttcaagaaaaatgggtatattgaaggaggatcaattttttttgaaaagataggaggacattatgaaagttacagttatcggatgctatggcggttttccggccgcaaatgaagcgacgtcaggctatttgtttcagtcaggtgattactctctgcttgttgattgcggcagtgccgttttgtctaagctgttcggatatgtgccggcggaaaagctggatgcggtcgttctgtctcattatcaccatgaccatatcgctgatatcgggccgctgcaatttgccaagcaagtcggttcgtttctcggcaaaggagagcatacgcttccgatttacggacatgatgctgatatagaacagtttcaaaagcttacatataaaacacatacaaaagggatcgcctatcagccggatcagccgttgactgccggtccgtttacgatcacctttttaaaaacgattcacccggtgacgtgctatgccatgcggattactgacggcagccacactgtcgtttatactgctgattccagctatcaggattcatttataccgttttcgaaagatgctgatttattgatctcagaatgcaatttttatgccgatcaagacggaacaagtgcaggccatatgaacagcctggaagccggacgcattgcaaaagaagccggagcgggagaactgctgctgacacatttgccgcattttggcgtgcatgacaatcttcgcaaagaagcgaaaaccgtttttaacggagaagtgaatattgcgaaatcaggttttgtgtgggaaggataaaggaggagcaccatgttatttatagacaatcaaaatatcaatgatccgcggatcaatcttgctatcgaggagtactgcgtaaagcatttagaccctgaacagcaatatttgctcttttatgtgaatcaaccgtctattatcattgggaaaaaccaaaatacaatagaagaaatcaatacaaaatatgtagaggaaaacgggattatcgtcgtccgccgtttatcaggcgggggcgctgtgtaccatgatctggggaacttgaacttcagctttattaccaaggatgacggggacagctttcataactttaaaaaattcactgagccggtgattcaggcgttacatcagcttggggttgaagctgaattaagcggccggaacgacattgtagtggatggccggaaaatatccggaaacgctcagtttgcaacgaaaggccgtattttcagccacggcaccctcatgtttgattcagccattgatcatgttgtatcagcattaaaggtgaaaaaggataaaattgaatcaaaaggcatcaaatcgatcagaagccgagtagcaaacatcagtgagtttctcgatgataaaatgaccaccgaagaattccgcagccatttgcttcgccatatttttaacacaaacgacattggaaacgtgccggagtataagctgacggaaaaagattgggagaccattcatcaaatttcgaaagagcgctatcagaattgggattggaactacggccgctcgccgaaatttaaccttaatcattcgaaacgttatccggttggatcgatcgatttgcgcctagaggtcaagacaggcaaaatcgaggactgcaaaatcttcggagatttcttcggtgtcggtgatgtatctgaaattgaaaacctgctggtcggaaaacaatacgaacgcagcgtcatcgctgatgtgctcgaaggtgtgaatctcaagcattactttgggaacattacgaaagaggatttccttgatctgatttattaaggcaaaacacatcgtttgaaagagcggttgtgtttttgaaataatggaggcaggagggattcacatgaaagtgtttttaatcggagcgaacggacaaatcgggcaaagactcgtctctttattccaagataatcctgatcattccatcagagcgatggtcagaaaagaagaacagaaagcgtctcttgaagctgccggtgcagaagctgtgcttgcgaatctggagggcagcccggaagaaatcgccgctgcggcaaaaggctgtgacgcgatcattttcacagccggttccggtggcagcacaggctatgataaaacactgctggtggatctcgatggagcggcgaaagccattgaagctgcggacattgccggaatcaaacggtttattatggtcagcgccctgcaagcccataaccgtgaaaattggaatgaggcactcaagccttattatgtggccaagcattatgctgataaaattctggaagcgagcggtttaacctatacgattatccgtccgggaggccttcgcaatgagcctggaacgggaactgtttcagcagcgaaggatctggagcggggatttatttcccgtgatgacgttgcaaaaacggtcattgcctctttagatgagaagaatacggaaaatcgggcctttgatctgacagaaggagatatgccgattgccgaagcattgaagaaactatgacagtactgacactcagggctttttgctcttgagtgtttttttctgtttctctataatggaggagaaagcttggcttcaataatgaatgactattcattcactttaaggggtgggagaatgaatcttgtttcaaaattggaagaaacagcatctgagaagcccgacagcatcgcatgcaggtttaaagatcacatgatgacgtatcaagagctgaatgaatatattcagcgatttgcggacggccttcaggaagccggtatggagaaaggggaccatctagctttgctgcttggcaattcgcctgattttatcatcgcgttttttggcgctttaaaagctgggatcgtggttgttcccatcaatccgttgtacacgccgacagaaattggttatatgctgacaaatggtgatgtaaaggcaatcgtgggcgttagccagcttttgccgctttatgagagcatgcatgaatcgctgccaaaggttgagctcgtcattttatgccagacgggggaggccgagccggaagcggcggatccagaggtcaggatgaaaatgacaacgtttgcaaaaatattgcggccgacatctgtcgctaaacaaaatcaagaacttgtccctgatgataccgcggttattttatatacgtcaggaacgactggaaaaccgaaaggcgcgatgctgactcatcagaatttgtacagcaatgccaacgatgttgcaggctatttgggaatggatgagagggacaatgtggtctgcgctcttcccatgtttcacgtgttttgtttaaccgtctgcatgaatgcaccgctgatgagcggcgcaactgtcttgattgagcctcaattcagtccggcatctgtttttaagcttgttaagcagcagcaggcgaccatttttgccggtgtgcctacaatgtataactacttgtttcagcatgaaaacggaaagaaagatgatttttcttccatccggctgtgcatttcgggaggcgcggccatgccagtcgcgttgctgacggcgtttgaagaaaaattcggtgttaccattttggaaggctacgggctctcggaagcatcacccgtcacgtgctttaacccatttgacaggggcagaaaaccgggctccatcgggacaagtatcttacatgtcgaaaacaaggtcgtagatccgctcggacgcgagctgcccgctcaccaggtcggcgaattgatcgtgaaaggccccaatgtgatgaagggctattataaaatgccgatggaaacagagcatgcattaaaagacgggtggctttatacgggggacttggcaagacgggatgaggacggctatttttacattgttgaccggaaaaaagacatgatcattgtaggaggatacaatgtgtatccgcgggaggtagaggaggtgctgtacagccatccggacgtcaaggaggcggttgtcatcggcgtgccggacccccaaagcggggaagcggtaaagggatatgtggtgccgaaacgctctggggtaacagaggaggacatcatgcagcactgtgaaaagcatctggcaaaatacaagcggcctgccgccattacgtttcttgacgatattccgaaaaatgcgacggggaaaatgctcagacgggcactgagagatattttgccccaataaaatgaaaaagcgaagcggttagcttcgctttttcattttcaatcctttgcttcttttttaataatatttagcagcgcctttgtatcatttttgcttaatttgtagtatgtgccatccttcaaaaaaacggcttgctggctgccgtcaatccatagtctgaatgagtcataccggtctttatgaaacttgattgtcccttcgtaatcaggggctgatgttttttctgtcttcacctgttttccctgattcataatatccagcatatctttgacgtgctgtcttttttcaatctcgatatcttcctggccgcttgaagacagtgtgatcaaatccgcgtctaccgattgatacacatcgcctgatcggctgtaaagataaaaaaatgcgataaacacaagaccgattaccacgatggctgccactatttttttcatttgcatcactccaaacattgttagttttcccagcgatcgggctttccatgcttaaaagggtggaaaagtgcggaacacagcttggttctaagaatttgaatttatgattacaatagaagtaacgggttgatgtgaggagtgaggcgttatgcgcaagtggattgcggcagcaggacttgcttacgtgctgtacgggctgtttttttattggtattttttcctgtcgggtgattccgcaataccggaagccgtgaaagggacgcaggctgatccggcttctttcatgaagccgtctgagttggcagtggccgagcagtattcgaatgtcaagaattttttattttttatcggggtaccacttgattggtttctgttttttgttctgcttgtcagcggtgtttcaaagaaaatcaagaaatggatcgaagcggccgtgccttttcggtttttgcagaccgttggttttgtgtttgtgctttcgctgattacaacattggtgacgctgcctttagattggataggctatcaagtatcgcttgactataacatttccacacagacaacggccagctgggctaaggatcaggttatcagcttttggatcagctttccaatctttacgctttgcgttctcgttttttattggctgatcaaaaggcatgaaaaaaaatggtggttatacgcctggctgttaacagtgccgttttcgctgtttctgttttttattcagccggtcattatcgatcctttatacaatgatttttatccgctgaaaaacaaagagcttgaaagcaaaattttagagctggcagatgaagccaatattccggctgaccatgtatatgaagtgaacatgtcagaaaaaacaaatgcgctgaatgcctatgttacaggaattggggccaataaacggattgtattgtgggatacgacgctgaacaaacttgacgattcagaaatcctgtttattatgggccatgaaatgggccattatgtcatgaagcacgtttacatcggtctggctggttatttgctcgtgtcgctcgccggattttatgtcattgataagctttacaagcggacggttcgcctaacccgcagcatgtttcatttagaaggacggcatgatcttgcggcacttccgctgttattgcttttgttttctgttttgagctttgcggtgacgcctttttctaatgctgtctcgcgttatcaggagaataaggctgaccagtatgggatcgagttgacagagaacagagaagccgctgttaaaacgtttcaggatttggccgtgacggggctgagccaggttgatcctccggtgcttgtgaagattttcagaggcagccatccttcgatcatggaacggattcaacatgcggagaaagaagagaatgcgccggaacatcaggatgctgacaaataaaaagaagcaggtatggaggaacctgcttctttttactattattgtgcagctgcttgtacgttgattaacccttttccatagtagaaagagtttccaagatatgttgcagtgctttctaaacgatcacggacttgcgcgtttgtccaagtcgggtgcttagaaagaattagcgctgctgctccggcaacgtgaggagtcgccatggacgtgccgttgtaagcaccgtaagtgcctccaggaagtgtgctttggatggatacgccaggagccatcacatcaagctcagaacctgcgcttgagaatgaagctctttggttgctgctgtttaccgcacctaccgcaatagtagaaggatattttgcagggtagccgactgtgcttgagcttccggacgaaccttcgtttccggcagcggcagcaacgacgataccgctggaaacggctttatcaacgactgttttcagcgctgtagaaccagaaggtccgccaaggctcatgttaataacatccatattgttggaaatggcccattcaatgccgttaataatccagctatattggccgcttcctgttgaatcaagcacttttactgcatataatgatgcgcttggcgctacgcccagaacaccgattgagttattaagagcggcaatcgtaccggctacatgcgtaccgtgagaactgccgtcctggtatgggtttgtttcagaaggtacgaagcttgctccgcctctgacgtttaagtcaggatgagaagagtcaattccgctgtcgataacagctacttttacgttagagcctgtgtagccttgagagtgaagagccggcgctttaatttgagaaatgccataaggaacagattgcgcatattcatgtgcaatatgatcttcttccacatatgcaacgctcggatcttttttcaattcttttacagctttttcatccaatgttgctgcggccgcgttaacatacttaaattgcttttgaacctttccgcctttttcagaaataacatcctttttcttggcggaactcatggcactcattgtctgtttaaatccgacaatgtatttcttttctgtactgctttttccggcagcctgcgcagacatgttgctgaacgccatcgtaaagattaacgttaacgcaaacaacaagctgatccacaattttttgcttctcactctttaccctctccttttaaaaaaaattcagagtagacttacttaaaagactattctgtgaatttattgtaatagatggaataatattttagtagacccatttttttgagatgattttatctctatttaggtatatcatctctcgctatttccgtagagactcgaaataactattttcatacagaaaagaacgaaaatagacatgagtaaatgttcattatgctgaaatgtcatgcttttttaggttaaatgctcctgagtcccggcaaatttctgtcgaaaaaattcgttcaaatgacctgcgtgtgcttccgtgagaacaatggatattatcgtgatattttttcaaagcatgatgataaaagtattctgaaaaataaactttacagaaaagggatagaatgaaaaaattattgagagggaggaagaaataagatgaacattcgccaagcaaagacatcagatacggccgccattgcgccgttgtttaaccaatatcgggaattttatagacaggcatccgatttgcaaggggcagaggcttttttgaaagctcgtttggaaaatcacgagtctgttattttgatagcagaagaaaatggagaattcataggctttacccagctctatccaacgttttcttctgtgtcaatgaaaaggatatacatattaaatgacttatttgtcgttcctcatgcacgtacaaagggagccggctgccggctgctttctgccgcaaaggattatgcagaggaaaacggggcaaaatgtttaacacttcagactgagcaccacaaccggaaggcaagaagcttgtatgagcaaaacggctatgaagaggataccggatttgtccattattgtctcaatgtgccggcgaagtgaaaatggcggcttgatgatttggttttttgaacgttcttcggttacgatataaatgaaaaggagtgtgccgaatgtcaacgttatttcaagccttgcaggcagaaaaaaatgccgatgatgtttcagtccatgtgaaaaccatatcaacagaggatttgccgaaggatggtgtcctgattaaagttgcttattccggcattaattacaaagatggtctggccggaaaagcaggaggcaatatcgtcagagagtatccgcttattttaggcattgatgctgcgggtacggtcgtctcttccaatgatccgcgttttgcggagggggatgaggtgatcgcgacaagctatgagctcggtgtctcccgtgatggcggattaagtgaatacgcttcggtgcctggtgactggctggtgcctttgccacagaatctttcgttaaaagaagcgatggtgtacggaacggcgggatttactgcggcgttatcagtgcatcggcttgaacagaacggtctgtctccggaaaaaggcagcgtgctagtcacaggagcaaccggcggtgtcggcggaattgcggtatcgatgctgaacaagcggggttatgatgtggtggcaagtaccggaaaccgggaggcggctgattatttgaaacagcttggtgcaagcgaagtaatcagcagggaagatgtctatgacggaacgcttaaggcgctgtccaagcagcaatggcagggagcggttgatccagtcggcggaaaacagcttgcctcgcttttaagcaaaattcaatacggcggatctgtcgcagtgagcggcttaaccggcggaggagaagttccggcaaccgtgtatccttttattcttcgcggagtaagcctgctcggaatcgattcagtatattgtccgatggacgtcagagccgctgtttgggagcgcatgtcttctgatctcaagcctgatcagctgctgaccatcgtggacagggaagtatcattggaagaaacgccgggtgcgttaaaagatattttgcaaaatcgcattcaaggaagagtgattgtgaagctttaacaggatcagcttgcagagaatgttatttttctgcaagcttttttgtggacaggatgatcagctgctgaactgctgtgtcgcgaaacaagattttcctgtaagccgaactttctcttctcattttaaaaataattggtgataatgattctcattccgtgttatactactcttggacatcttaaccatagaaactaccaacaggagagactggaacatatgaaaaaaacactgattattcttacagttttacttctttctgtcttaacggctgcttgctcgtcttcaagcggcaatcaaaacagtaaagaacataaagtggcggtaacacatgatttagggaagacaaatgtgcctgagcatccgaagcgggttgttgttcttgagctaggttttattgatacactgcttgatctcggcattacgcctgtcggggttgccgatgacaacaaagcgaagcagctgatcaacaaggatgtgctgaagaaaattgacggctacacatctgtcggcactcgctcacagccaagcatggaaaaaatcgcttcattaaaacccgatttaattattgctgacacgacccggcataagaaggtgtacgatcagctgaaaaaaatagcgccgacgattgcacttaataatttaaatgctgattatcaggatacaattgacgcttcgcttacgattgcaaaagcagtcggcaaggagaaggaaatggagaaaaagctgacggcgcatgaagaaaagcttagcgagacaaagcagaaaatcagcgcgaacagccagtccgtgcttttgatcggaaatacaaatgataccattatggccagggatgaaaacttctttacatcgagacttttaacacaggtcggctaccgatatgcaatcagtacgtcaggcaatagcgattcaagcaatggcggcgactctgtgaatatgaaaatgacactggagcagctgctgaaaacagatccggatgtgatcatcctgatgacaggaaaaacagatgacctcgacgccgacggtaaacgcccgatcgaaaagaatgtcctttggaaaaaactgaaggcagtgaaaaacgggcatgtataccacgtggatcgtgcggtgtggtctctgcgccgcagtgtagacggggcgaatgccattttggacgagcttcaaaaagagatgccggctgctaagaaataaaagaaaagacaggcaaacgcctgtctttttcttatttgataaagccggataagtggctgttgatattatagtcttttatccgccatttttcttctgcaaattcaatgttgctgaggcaggcgttgacgagacgggtgctttgaagctccgggtcaccgccggatatttctgtcagcagggcgtgaattgccgcaccgtgcgccacgatcagcaccttcttgtttggatacgcctgattcacttttgccaaaccgcccatcagcctgtcagtgagttcttctaaggtttccatattcggatagatgttatctggatagcgctttgtccgttcctccagcggcatgccctccgcgtcgccgtaatcgcgttccttaaaatcatccatctcgactatcggaagatgcagatattcattaataatttccgcggttcttttcgctcttttcagcgggctcgtcacaataatatcccaagaaaagtcctttacatattctccggtttctcttgcttggcgttcacctgttgcgtttagcgggatatcggttttgccttggcatttttgctgcaggttccaatcggtttctccatgtcttactaaacaaacggctgtcataaaatccccttcctgactttattcatatcgctattatactaaatcgaaagcgtgtgtcctatgaaaaagcctatgcaagaacttcaaataataaagcaagtccaattccgccgccgcttccgatggctgcaaccacatattgacagtctgtccgtcttttcgcttcataaaacaatctggttaccagagctgcacctgatgcaccgtacggatggccaagagctaaggcgccgccgcgcacattgatttttgaaaagggaatgccgagttcttgcgagcagacacaaattttgacggcaaaggcttcattgatttcaaataaaccgatatcctcaggtgttacatcgtgtgtatgtaagaggttacggatcgcatcaaccggtgccgcgggcggatagttggggtgaatcccactgactgcgctgccgataaaccggagcacaggcttaagtcccagggctgccgctttttcttcttccattaccaaaagagccgctgctccgtctgctatgccgctgctgttggctgctgtgactgttccggagctggtgtcgaaaaccggctttgcacggggaataatcgcttctattggccgcgttttcaaaaatgcttcgtccgtctccaattccccgagaggaacaatttcttcacggtaaaatcctccatcatgcgcgttcctgctgcgttgatggctgagaagggcgtactcatcctgcatgcttctgctgatggaatagcgtgcagccgtatattctgccgcaatgcccatgtctggatcgccgatggcatctggagaaaagcgggcccgttctgaaaaaggggattggctgctgctttctgagccgcccgcgatatacatcgtgccggctcccgcttgaataaggctgcaggcatagcgcacagcttcaaggccggagccgcactgtctgtcaattgtcattccgggaactgataaaggcagtccggcttgaagggctgacagtctggcgaggttgccgcctctgccggtagcgtttccgagaatgacctcgtcaacttgatcctctagctttcggctgagacagcggatgatgggagctgacaaatcctccggcaggaagggcttcagcagtccgttttgatttccaaagatcgttcgttttgcatcaacaataaccgcattcatttatactgtatactctcttccagccattttttcactctggaacgggcaatttttccgctgctcgtttccggcaagctgtctgcaaacacccattttttcggaattttataggaggctaatttctgtttacacaaggctttcagtgttctggcattagcgtttccatgaatgacagctacagcgatttctccccaatactcgtcgggaatgccaacgacagccgcgctttcaacctctgggcaggcgagaagcacacgttcaatttcttctgggaaaatatttaatcctccgtacacgatcatcccgttttctcttcctgatatgtatagaaagccctcttcatcaacatagcccatatcatccactgtcatccattcatctggtgtgctgccgttcacatagccggaaaaccgcatcgggctgttgacaaatatttttccgacttcgcctggctgacagcgttctccttcagcgttgcggatttcgatccggacattatgaaaagggcggcccgctgaatgcggtttccgtttgctgtcttccggtgaagaaaacgtcacaaaactaagctctgatgtgccgtaaaaatcgtacagcttgagatgaggccatgcagcggcaagcttctccttggattctgccggccagtctgcgccggatgaaatgattttgacgggactgtcgggaaaaccctcaatccttgtgagggcgtctgtcatcgtcggtacggtatagagaacactgatggattcacggcacagccattccttcgctttggcaggagaaaactttttcagcaaacaaacggttcctccgagaaacaaagtgctgactgccccgtataagaagtgagaggacattaacgtcccgggaatcaataccgtgtcatttgatgtaattgaaaaatctgtttctgtacaggtaaagctctctatccatgagcggtgagatcgcgtgaaggccttcggttttcctgtcgagcccgacgtaaatcccatataaaaagggtgctccggatcaatggtaggcaagggatcagcggttgcttcagaaatatctgccatacagttatccagcaaaacaacaggtgtctggctatctgtcagtttgtttttgaaaaaggctaaagtaaccacaagatccgcattgcttatggacagccgctccttacattcagccgggctccagcgtgtgtcgatgggaatggctgtgcaaccagccgctgcggctccggcaaacagctgtaaaaacgccagactatttgggagcaggatcgccacacgattcggcatgctcggctgtgaccgcagccaatttgcggtttgagagacaagccgatcccaatcctggtacgtgatttgctccgattcagtctggatcgctacacggccgggcgatgtttcggcagtagatgaataggtatgagtaattgtcatgtagtgtcatcctccttttgtaaacatcgtatcagaaagagacaaggcttgagtgatttttatcgccagaaatgcagatacagccgcttttatcaaatcaccaggcacatatgcaaggctcatgaaggcggcctgtgacaaatcaatatgcatgataaaagcttgtaccggtataccaagcagataaataaagatgatgccgaatacgatatgagtgaaaaagagacgcaatactgtcaccttccgcagcctgttagcggctaaactgatcagccatgaagcgaggggataagcaatcaaaaagcctgcgctcggtccgaaaaacacaccaaaaccgcctcgtccgccgggcaacagcggcgctccgaaggcgacgagcagcaaaaagacaagctggcttaagatagcagactttggcctgagaatgctgcctgccaacatgacaccaagcgtttgcaatgtaatcggaacgggtgtaaaggataagaagagagggggcataaagccgagcactgccatcagcgcggtgaaaatcgcaatatgcatcatgtcgattaatttcagcatgtgaaatcctccaaacagtaatcaaatatggttatacaataaatgccggtaattattatgtcaactgatttttgatttaagtttacataatgaacgcaaaaaaaccggccgtatggcagaccggtttttgatggttattcttctgtcaggatgacaagcgaatcaacggaagcggccacatgggaaacggcgcggctgacttcctgaagccctccaagaaaggcttgcagatcgacgtcgattttgcctgattgctctttgctgattttcatgctgtggacgatttcatcgaataagcggttaatttgcgtcattttttctttactttcgctgactagctcattcacgtctttgatatgcttggatacaatgttgatttgtgtattcgtattgttcacaagctcagaaacagtagagacggtttttttcgtgtcctcagaaagcttccgcacttcatttgccacgacagcaaagcctttgccgtgttctccggcgcgggcggattcaatagatgcattgagcgagagaaggtttgtttgttcagctatgcctgtgacgatgccgaagattttttcaatttgctgcgcgatttcatccagcttgaccatttctttttcgatttggacaaggcttgtgtcaattttgttcatctgtttttgctggacttctagctctttttttccgccgatcgacttttcttcaacagtgctggatgttacagtgccggctttggatgcttgagaaatgccttcagatttgtccacaagctcttgaactgatctgcttgtttctgaaaacagattggcaatcgatccagaggtttcttgaattttctgatgaagaaggtttttcttttcttcttgttcatcacgggtctggttgtactcgctttgaaacgcttcaaggacaagctgctgttctaagttcaagatttttgttgttgctttaatggcttttagcagttcttgctgatttgtaatggacgcttcataaatgtcaatcattgacaaaagaagctcttgaaacgcacccatataccattttggcaaaaggccgattcttaaatggatggaggcgattcggttacgcttttcaataaattcatcatcgataacgcctgcaaacatttcctgaatatgccgttttaacgtttgttttaagcggtcaactgagctgtgatcattaatgatatccatcaatgagctttcatggtcaaggtttttataaaacgcatcaacgatatttacgatattttcttgaatgagtggctgaagctgctctaacacgtaaagctcagcatctcccaacctgaccattttgagctgttttttgacatctgcatgtttgtttgtgagctgaatgcggtttttttgctgtccgtttgaatctgaaaagtaagctgtttcttgttttctgtcttttttaaataacaatacaatgatcccccttgggaaaaatataatttttactttttggctttttaagcctttttcttttttatcggccaagggaaacatgaatgaagctgcagatgaaaaatatttgaaaaaacgttcattaaaatgaacggtttaatcgagatctatttgttttaatggtttaatggccggaccctctacaacttcgccagatggcttaaagcgtgatccgtggcacggacaatcccacgtatgctcactgtcgttccactcgacctcgcagcctaaatgggtacaagtcgtatcaacgagatggaggcagcctgtctcatcacgaaatgctcccgctcgcctgccgtttatggtgacggctttcccttctcctggcgaaatgtcttcaaattggacatcaggcttttcaagctttccttttatcaaatgcttggcgacatctgcattgtaggaaatcactttctgcaacccgggattcagatggaaacgggacggcgtgaaaatgctttcgtatgggttttcttttttctccacaaggtctgacaataaagtggctgcgactgctgaggacgtcatgccccattttttgaacccggtcgctactagaatattgtcctcattttccgacatcggcccgataaacgggattttgtcgatcgtcactagatcttgggtggaccaataatatggaatgctttcgatgccgatggtgctttcggccagttgtctcagtgtttcataatgtgtagacatggcttttccctggcctgttttatggcttactccgctgaagagaatcagcttttcaccgtttacaaccgtatagcggagcgccactgacggctgatcgatactcaaatacatgccctcgggatactcgatcttcggcttgatggcaaggacataagatctgtcggagtacattctcgcagcatataatccgcctccgtcataaaaagggaagtgggaacagcatatgataaagcggctcttaatggcgtgccggctttttgttaccacttcgggcctttcgccttttttgatatcaagcgcaacggtctcttcataaattcggccgcctttttgaacaatttgctccagaagcgcttttaagtattgaagcggatgaaattgagcttgattcttcatgacaagcgccagcttagaacctaagggaattggaagatccttgataaggtctctttcaattccgagctttgtgtatgcctcatgctcggtgtggattttttgaacagcgttttcatttgccgtataaagatatgcgtcttgctcggtccattcacaatcaatttgatgttcatccacaatgccttttatgtaatcaattgcgttttggtttgcttcataataaagcctcgcatggtttaatccgaaatggcggataaattcgtcgtatatcatgtcatgctgtgcggtaactttagcagttgtatgcgcagtggttccgttaagaacctgatttgcttcaatcaaaacgacacggaagcctctcttcgtaagttcatatgccgttgtgattcccgtaatcccgcctccgataatggtgacgtcacattcagtgtcctcttgaagcgcaggaaaagaaggcaggtcagttgatgttttccagtatgtttcaggtgcttcctttgcaaaatgttgattagccaagccgttatacctccaatcagatttattcttaatttttccatattctatcttttcatacataggaagcaggcattgttcataacataataaggttgaaaaggagtgatttcattggcgaatcaaaaaaagaaaacattaccgcctcagcaccagaaccagcagcctggttttgaatatctgatggacccgcgtccggtttttgataagccgaagaaagcgaaaaaattagagggcaaaaccgctattattactggaggagacagcgggattggacgcgctgtctcggtgttattcgcaaaagaaggggctaatgtggtcattgtgtatttgaatgaacatcaggacgccgaggaaacaaagcagtatgtagaaaaggaaggggtaaaatgcctgctgattgcaggagatgtcggggatgaagcgttttgcaatgatgtggtcgggcaggcaagccaagtgtttccatccattgatatattggttaacaatgcagctgagcagcatgtccagcccagcattgaaaaaatcaccagccaccagctgatcagaaccttccaaacaaacattttttccatgttttacttaacaaaggcagtgctgcctcatttaaaaaaagggagctctattattaataccgcttcaattaccgcctataaaggcaataaaacgctgatcgattattcagcgacaaaaggcgcgatcgttacgtttacaaggtccctttcccagtcgcttgttcagcagggcatacgggtcaatgcagtggcaccgggtcccatttggacaccgcttatcccggccagctttgccgcaaaagacgtggaagtgtttggttcagacgtgccgatggaacgcccggggcagccggtcgaagtggcgccaagctatctataccttgccagcgacgattccacatacgtcacagggcagacgattcacgtcaatggcggaacaattgtgaacggataataaaaagccaatccttgaaggattggcttattcgctctgcttgagcgctgcatattctttagagagcgtaagaaacgcatctttatctttttcgtccaaggctttgttaatttggtccgtcagcatggcaagccgacggttatacaaggattcatcgagcaccatttgaatgtaaatatccgtcattgtgacatcgaattcttttgttttttgcgtgttgcgggacttcatgagctcagtgtacgattttttctctttcataaagaatccccccaatgccttttttatagtatatggataacggtcgaaaaaatcaataaatttttataatttttagacaactaatacttggcaatctatcgacatatcctgcaaaatgccgtaaaccggcaagtcttatgaaagtaaaatcggtttattactagtcatttagtaccgttaaatatcattaaaagatgattttatcttaaatgttaaaaaaacctgtcgttttacaaaaacagatgatagattattagtataaattttgcagaaaaaggatggaggccataatatgagtcagaaaacagacgcacctttagaatcgtatgaagtgaacggcgcaacaattgccgtgctgccagaagaaatagacggcaaaatctgttccagaattattgaaaaagattgcgtgttttatgtaaacatgaagccgctgcaaattgtcgacagaagctgccgattttttggatcaagctatgcgggaagaaaagcaggaacttatgaagtgacaaaaatttcacacaagccgccgatcatggtggacccttcgaaccaaatctttttattccctacactttcttcgacaagaccccaatgcggctggatttcccatgtgcatgtaaaagaattcaaagcgactgaattcgacgatacggaagtgacgttttcgaatgggaaaacgatggagctgccgatctcttataattcgttcgagaaccaggtatatcgaacagcgtggctcagaaccaaattccaagacagaatcgaccaccgcgtgccgaaaaggcaggaatttatgctgtacccgaaggaagagcggacgaagatgatttatgattttattttgcgtgagctcggggaacggtattagaaaaataggaaggagctgaccgaacagggcagctcctttcataaagctatgccgtcggaattcctccggtgatgccatatacctgagatgtcacatagcttgaattctctgaagctagaaatacataaacatcggccaattccactggctgcccagcgcgatttaatggagctggcggcgtgccttgtccgaatttcgggatgttttccgtcggctgtccgccggaaatttgcagcggtgtccaaattggtccgggcgcaactgaatttactctgatgcctttggaagcaagctgttttcccagtccgacggtaaagccgataatggcgtttttcgttgctgcgtaatctaacagcatcgggcttggattatagccttcaactgaggtagttgtaataattgaagctccctccggcaaatacggaagcgccgcttttacaacccagtaaagggaaaagacgttcacttcaaatgttttatagatttgttcagtaggcagatcttcgatgttttcgaccgcttgctgtttgcctgcaacgagcgctagcacatcaagtccgccgagttcgtgatgcgactgtttgactagatcttggcaaaaggattcgtcgctcaagtctccggggatcagcactgcttttcggccttctgcttcaatcagctcttttacctcttcagcatctggctgttcctcgggcaagtagttaatagccacatcggcaccttctctggcgtaagcaattgcggcagcgcggccgataccggaatcgccgcccgtgacaagcgcttttcgacccgttagtttacctgatcctttgtagcttttttctccgcaatcagggacaggtttcatgttcttttgcaggcctggcggttcttgatattgttcgggaaattcatcatgaaaaaatgcttttataggattcgtaagatttgaatcagacatcagcaacgctccttttctgtttggtgtacattcgtatgtgtacccctgagcataagcagaaaaacatgttttggcagtttgaatagtgaaggaaaaagaaaacaagaaaaaacaaagccttcttccatatttatcttgtcaaataagactatatgaattatgataaattcgagctataaatcaactaaatattgggtgttgggagagtgaatcgtcatgaaaaaagcggcggcggttttgctgtcactcggtctcgttttcggtttttcatacggagctggccatgtggcggaagccaaaacaaaggtgaaggtctataagaactgcaaggagctaaacaaagtatacaaaggcggagtggcccgcacatcgaaggtgaaaaacaaaggcggaaaaacgaagtacaagccttacgtttctaaggcgctttacgatgccaataaaaacaaagaccgcgataaagatcttatcgcctgtgaacggtaaataagaaaaagcaatctggtgtccagattgctttttctattgcttaagccgcctgatcggccgcagcgcttttcgccttccttgtcataaggctgactgccatcatgaccgtgatattcaaaagcagggcgacgatgccgacattcaagtcttttgcggcttgcggcagagccggaaataaagtgccgatcgtcgtttccgtcattgtaatataagtaactgctccgacacctgcaataatgccggcgaaagctccttgctttgtcaccatattatgcttgagcaggctgaacaaaagggcggggaatagctgtgtgacaaggctgtagcccatcaaaagcagcgtaacgatggtattcccgcctttgaaggtaaaatacaccgaaatcagcgcaatcaccggcactaaaaacttagcaagcgccgatacttgctgttctgtcgtgcggggcgcgattaccttgtacacattttttgcaaacagtgtggaggcggacattaagatcatagaccctggcacaagtgctgtcagcagtccggcagcaccgataattccgacaaaccaagggtcaaatgcttgcagagacagtctcaaaagcgacaaatccccgtctgcgccattcagatctggaacttgcaggatagccgcaaagccaacgaaaagaacgaagagcaggaccagctggtacaaaggcatgatgatggcgtttttacgaaacacttttgggttttcggctgaatacgaagcggaaaacgtgtgaggccacatgtaaaaaccaagcgctgtcaagagtacggttgaactgaaccaggccacactttgtcccgattcggggagcgtaagaaagccaggctttgccgtttcaatctgctgaaacatgtcttgaaatccgccgtagtaatgaattggcaaatacacacctaaaaacagaacgacaaccagaatcatgatgtccttcacaaccgatatccaggcagacccgtgaatgcctgaaaccataacataaaccgtgatggaaacagcgccgatccagatggcggcggtcggggtgattttgccgtacgaggtttccgatacaatcagcccgaggcctttcagctgcagtacaagatagggaatgagtgcggcgatgccgaccagtgaaacgagaatgccaagcagcggactgttgtatttttttgtgaaaaaatcagactgcgacattagtttatgctgtttcgcgtacgtccaaactgctggaagaagccagtaagaaaggatgtaggccagacatccgtaggcgatgatataaaaggctggaccgccctttccgtaggcccagccgctgccgccgagaaacgtaaaagtagtataaatttcgcctgccatcaaaaggaagacgaacacagttccgaagccgcgccctccaaccgtccactgctccaggttcatgtcttttcctttttgggcgcgtataccgagaaaaatactcaagagcaggacaccgaaaatgatgatgagagctgcattcattctgcttcctcctttttattttccttgtcgaggacatacacaatcgccatcagcgcagaggtcaaaagagcccacatcacaatataggcaagaataaacggcatgccgaacacgtagggggtcaccttatttgcaaaagggatgccgagtaagataccgataaagggcaaagcggcaagaacgtgaatcagtttcatagaatcctccttctatttaggattggggtgtacaagcccaagcgtactgaaaatgatgtcgcagatatggcagcacatgtcactttttagggtgaaaggctgtggttcgaattataaataaatttattttgtttgtatagtgtgaattgtctgaaattaatgctctgaatcgcccgaagagggaacgggcagtatgattcaaaaggctcggagtctgtccggggcaaatagatagtatgttaataattcgctgacctgctcacggattcgcggattaaaatagcgatggttttcttcataaccgtcgatgacaaatgtatagagcgtaaaggcttcatcgcgttccgtctcgcggattgcaatttttcttttcctcagttcttttctgacctccatcaaatccttttgtgctatttttaatgattcgctgataagctgtttataaggatgcttcaattttaatgtgctttcttcaattccggcgagatcacggttaaaaatcgtaatggccatgggcaaaaagagagcccgttcaattaaatcgtatatttcctcctgcagatttggcatgttgactccttctttctaagggaacgtttgttctatttgtattctatatcggctggtgaaatgtttcaagacagaaaaaatcaccaaaactttttagttttctgctgataatgtgtagaataaggatagacaaacccggtaaggagtataaatgttggagcattttttatcctatttgacacaagaacatttaactgaattatttcaaagctatagggctttcggtccgctcatagctgtgctgctgcctttaattgaagcatttctcccgtttttgccgctgatcgtgtttgtggtggcgaatacgaactcgtttggcttgtgggaaggattcatcctgtcttgggcgggatcaactgctggttccattctcgtatttttgattgtccgtcaatacggacagagaaaattgcttggatttatccgcagtcatccgtctgtaagaaagctgatgttatgggtggaaagacacggcttcggtcccatgtttcttctgctttgttttccatttacaccgtcagccgcggtgaatgttgttgccggtttgtcaaggatcggaacgcggccgtttattttggcggcagcctcggggaagcttgtcatgatttttatgatcagcttcatcggatatgatctgcacgcgctgattacacagccgattcgaacggtcatcgccgtattggtgatcactgtcttatggtatgtcggcaaaaaggtggagcggtatctgcatgtaagagccagtcagcgtgagcatgatggagggagacagtaacatgaaaaaacggttttggtttcttgccggtgtagtgtccgttgttctcgccattcaggttaaaaatgctgtctttattgattacaaggtagaaggcgtcagtatgaacccgaccttccaggaaggaaacgaattgttggtcaataaattttcgcatcgatttaaaaccatccatcgttttgacatcgtcctttttaaaggccctgatcataaagtgctgattaaacgggtaatcggcttgcccggtgaaacgatcaaatataaagatgatcagctgtatgtgaacggaaagcaggttgctgagccatttttgaagcatttgaaatctgtttctgccggcagccatgtaacgggtgatttttctttgaaagatgtgacgggaacaagcaaggtgccgaaaggaaaatattttgtcgttggagataatcgcatatacagcttcgacagccggcattttggtccgataagagaaaaaaatattgtcggtgtgatttctgatgccgaataaaaagacgctaatggaagaggcgtctttttgtatgccgtttggaaaaatgtgttgaagaaaaatttgtaaggagctataatcaaaattgttacctgtgtaacaaaatttatatattttttgattggaggtccgtttttattggtttttgttcgttttgtatgaaacaaaaggagtggtgaatgatgatgaaatatgaagcagtgattataggaggagggccggtcggatttatgctggcttctgagcttgcgatggccggagtgggaacatgtgtgattgaacggcttgaaaaacctgttccgcattccaaggcgttgacgctgcacccccgaacgctggagcttcttgagatgagagggattttagagcggttcgtatccaagggaagcaagatacctaccggacatttttcaatgctggatacccgtctggatttttcaggcttggatacgagctgtccttacacgcttttgctcccgcagtcaaaaacagaaaagcttcttgaagatcatgcacgaagcctgggaacagaggtgtttcggggtgccgaggcgctggcggttacggaaaacggggaagcggtccaaacaatttttaaggatcgggacggcagtgtacggacgatcacaagcaagtttgccgttggtgcagatggcgccggaagtaccgtccggaaacaggcaaaaattgagtttccgggaacagacagcactgtcaccgctgcgcttggggatgtggtgctcctttctccgccgccgtcaggcgtgctgtccctttgcacaaaagagggcggtgttatgattgttccgttatcttcagaccgataccgtgtcgttgtgatcagtccttatcgcacacaaatgccgaaagatgtgcctgtgactgagaaagagctgagagctgatctcctgcgaatttgcggaactgacttcggtttaacagacccttcgtggatgtcgcggttcgggaacgccgcgcgccaagcgaaacggtatcgggacggcagaatctttcttgcgggtgatgccgcgcatattcattttccagcgggcgggcaaggactgaatgtcggccttcaggatgcaatgaacctcgggtggaaactggcggcggccatcaaaggctctgcgccttcttggcttttggacagctaccatgacgagcggcatccggcagcggaagggctcctcagaaacacggaggcacagacaaagctgatcgatttcactcaagcaggcctccatttgcgaagcatgatgtcggagctgctggccttccctgatgtgaatcgatatgtagcagggcaaatttctgcactcgatgtcagatatgaagctgatcgtaccatgccgccgaatcgtttgaacggggcacggctccctgacatgaagctgattctttccgacggcagttcggaatggctgtacagctttctccaaaacgggtcattcgttttgctgtcattgaggcaggaagctgatgagcatatcgaagtgaaaggcttacgtacggtaaccgcctcgcttgcagaaccgaatgaaaagttgcgggatgtgcataccatattggttcgtcccgatggacatgtagcctgggcggtggatgcatcagcgcccgattgttccgaggtgattcaaaaagggatcagccgctggttttccgtcaccagccgagtataattcaattcgattgtttcatctgtaacaaaacggtatgatagaagaaacaatcgaatgaaaaaggatggaaaacccgatgaacacagatcatacgaaacgcaatctttttgaattgtatgcggagctcattcatcaacaggagaaatgggaggggcttattaaagcctttttatctgacgaattgaggaagctggatgtagagcacgggagtaaatctcaattgacgatgacagaaattcatgttctatcctgtgtcggggacaatgaaccaattaatgtcacgtcgatagcagaaaaaatgaatacgacaaaagcgactgtatcacgcatcagcacaaaattgctcggcgcaggcttccttcacagaacacagctcagcgataataaaaaggaggtctacttccgattgacgcctgctggaaaaaagctgcacagtttgcacaaatattatcatcagaaggctgaacagcgttttctgtcattttttgaccgctataccgaggaagagattctttttgcggaacggctgtttcgggatctggtgacaaaatggtatccgtcgtcagaagaaattgaaggggggcttcctagcatttttaaataaaaaacacgcactgaggtgcgtgtttttcgcttttttctatcttgttcaaggctgtaacgtaaatcagatttcatcttgaagaatgaaattcaagatgttctggaatttgcactgcttatacgatatgtctattagtatctttattttatacgttttttactgtgtttttgatgctttgttttcaaatgaaatagggtcttctgttttagttctcctaatctttacagaaatacctactagaatgaccgccatagttgtaaatattcccatggttaataagatcgtatcctgatttaaactccatccaattaagaaagagatgatcgctcctccgaaacttgccgaagcaataaataaacttgtaacttcgtcaacgtacttctgaataatgattgatgctagtgttaaagcaatgggaaatatgcccgctatacttaggccaatcaaaaatgtaccgcccaattgaagtattgggttacttatataagagaaagcaatcaacaaaacaattaaacaactacagctaaaaaggaggtatttagaaaaatcaagccttctacttacgaaaccaatcaatattcttcctatgatgatccctacccagaaaaaggagacacttataagactaatttgttcattgtcttggtttatcatgattgaaggtaaaaagttggcaaaatttgtttcaattccagcatataggaaagcgaaaaatacaaaaaagcctaattgctttgatttttttctatctcctataaagtattgaaatgctcctccatctggaaaggtcacttgttggttagcattcttagcgtactctcggttcttagacaagaaaattaaccaccctacgaataggacgaataaaaaggtgaatatacagtaatacggtaaaaaccagttattgatatctatgaaggaattaattaataatgggaaagataaagcgcctaatccaaagagaacttccagcttactcattttttctgcattactttcgaaattagcaataacaaatgaaccaactgtcgtttctaatgtgcctgccccatatcctaagagaaaagccattacaacaatataataccaatccttagttagaaaaaagatacttaacgctgcaagcattattgtcaaagctaaagtaagtgtcctaaaatgactgtatttcttaatcattaacggtgcgattaatactccgcttagaaatccggtaaactgaaagaagattatgaccgaaatatcatctgttgtcttgttaaaagactctaatagaaatggtgtcaaactccctgttgatatatggataatgcctactgtaaaaaagaaagcatatccaaataaatatgtccctcttaacattcattacacccctatatgaaaaagcaggaaaataaattcctgcttttttagtaacttctctcttcgaaatactagttgactgctgaaacagacattggttgagagttgctgtctttctcaaagaacatttctaatacttcctgagatctaaaaccatcactaaaagaagggatctcaacccaatcattctgagttgatgcaatccaattgattaactcgcttctaaaagaatcagcccatccataaaactcgtttggcggatcgtttaataggctttgcggtactgggcagtctaccacgttcaagccatctatgagcttgtaaacgtgaggattacctgtgtggtatttaaactcttttttgtgtccaactacctcaatgctaaaaccacagtcttcaggtacagaacattttgatgtgatgatatttacaaataccttgttcttcagctggccataaatttctgcatagtcatctacgagtacctgtttatcctcttttgtttttacatttgtgttcatttttgccgttactgattctgtgatgaaatcactctcaaacaaataccataccatgtcaataaggtgaatacccagatcccccaatgatccactcgtcttcttactgttagcgtcatctctccaagtaaacttcttacgcctaagtgcactatttttcttgaagtgtacttttatggacagtatgttacctagttcattattgataattaagctttttaagatatttacgtaagataaatatctataattaaatcccatactggctcttacgctcaacctttcagcagtatctttcattatgcttgcttcttcaagagaaatagccataggcttttcacacaaaacatgcttatgttttcctaatgcttgcaaagcatgttctttatggcaaaagtttggtgatgctacaattaaaccttctgaggcatcaattagttcatctacgttttcaaatgacttcccgccgaaagttttcacaaagctttccgcattttgttgatttatgtcatatacccctactaactctgcattttttattgtagataaagcagttgcatgcgctcttgcaataccacctgcacctatgatgcctatcttcttcatttttatttcctcctcatgatccaattaatttttttaaggtattagtaattccttttgagtactcactatcagttataaggtggtgcaagttttttgcttcctgtgttgcattttttagcagatatccattccctactgtctgtaacatacgaacatcatttccactatccccaaatgcgatagctctttcggtatttaggttgtatttctctaacataaacgttacaatttcattctttcctgtccctgtggggataaaatctacatcatagctgtcttctggatcgcctgctaagggattacaccgatttatatttactgaaacgccgtattcctcgcagattttttcaattgctaataggtttttcttgtcgtttatttcatcttgttcctgatagtagaagttatgcttataccgtgactttcctaattgagtttgaggattcaaaagaatgttatgattttcatgtagctgtttcacaagtttttcaaccttttctttactaaacccttcattaatgcgactgttccacttgttatcttgctgaccgaagttatgctctgaaaagtacgtaatttcagttccaagatcactagctataaaatgcggaaaatatctaaattttcctcttcccattttatcgagaatagattctatactgctcccagtaacccatccgattattagcttcccatctttacttttttgttctagatagtcttcgagttcatagatgtcttgttgcttttgttcgtcgattgtatgcggaaaatacgtttcatcaaaatcacaaaaaacaatatactgaggatgttcaaccgtggataacgttttatactccgatttcttgcttaataacatgaaacagtccctccattactctgtcttgttcttctaaagtaaatgacggatataaaggcaaatgcagtacctgactatgagccttttccgtatgaaccaattggagtcctgcatacttgtcctgtactaaaggagttttttgcatatgagacagtattggataatatacatctgtttgaacaccaaaatcttcatttaatttagtcatgatatctgcccgatcttctgttcttaccttaataggaaacagatgccatacatgatcttcacttaattctggtaattcaatatagcctttattctgcaactctgctaattgggtaatgtatctatccgccaagaacaatcttttgaagttgtttaatgaaaggtacttcattctctctaaaccaattgctgcctgtaaattgtccatttttgaattaaatccaaaattgatgactttcttattttttacatttacttcaaaaccgtgataactaaattgaatgcattttttagcgagttcttcattatcagttgctattgccccagccttgccacatacaccaaaattcttatagggattaaaacttaatgtagtgatgtctgcatactttcctaagtctgtcagtccaattccttggcaggcatcttcaattactttcaatttataacgatttgcgatttgacgaatatgctgcatgtctgaatgttttccgtataaatgcacaggtagaataaactttgtataaggagttattgcttcttcaattttgtcaggatcgatgcagaatgtttgtgggttaatatctacatagataggaacgcctcccaaagctaacacagcattttcagtagctgaaaagctattagccggcatgataacttcatcccctgggtttaatcctaaagccaataaacctatcataatagcatcggttccactgctggttgcaattacataccttttatgtaaatatgtagataaaactttttcgaattgctctaaataggaaccactcgtaaattttccagttggcaaaacttcagttaatgtatttaagatatcttccacttcatcattggttattaatctgtctacaggcaaaaaagggactttactgatttcacgatttttttgatagttgaaaagatcatgttcaatatctatcttttcttttaatacttgtttccaccgctcgtttacaatactgtcttcaataacaagttcttttccttgtacgtcaccttttaagtgttttaatagtgacatgttttctttgcttttacctgaaatcttaacctgtttttgcatgaacagtacctccaatgattttataatctaaaaatttattacaaatttatcctagtttctgaaatcggtaacatgtcaacaacttttttaaggaagggaaaatatgcctacaattgatgaaatagcaaaattatgcaatgtgtctaaaaccacagtgtcaagagtattgaataatcatccttatgtgtcgaaagaaaaaagagatatgatcttaaaggctattaacgaacttgactacactcccaattatttagctcggaattttaggagaaataagacacaaacgatagctttatcggttccgagtatcgaccatccattttttgctcaattaataaaaggggtctctcatgaagcactgtttaagaattacaaggtaattgtatttcagaccttttatgacaaacagacggagctagaattactagagttattgaagcataaagaagtggatggcattattcttgggactttagaaaatgaatgggatcagatatcccctttcttaaagtatggtcctatcttattatgtaatgaatatcatcactcagcggacatcacgataattgggtatgatgaatttgaagctacatacatgggggtagtacatttaattgaaagagggcataaaaaaattgggttttgttttgatactccatatagcgaagctcaatgtcagaggaaagagggttatttgaaagctttacaagattacgatttacatcatagaagcgaatggatattcggcgaaatgtttaatatcgaggatggctttcgtgtttttcataagataaaggatctaaaggacagaccctcagcaatatttacaggaaatgatcaagtcgccgcagggattattaaacaggcgatgaaaaatggctttaaagttccagaagacttagctgtaattggttttgacaaccaattgatctgccaagtcgttactccgaccataacaacaattgatatccccgtaatagaattaggtcaacaggctgtgttgaaaatcatcgagtccatttcgggtaatgccactttaaacagaagaattattaaactgccaacaaagcttattataagagaatcaacgtaacgatagatttccctttatcattttatatctttatataagaaaaagaggttattcattttaacctctttttcaatcgtaagtcgtcaattatttctttcatttcaccctctggcagcattcacttcaaacctgatccattaacaacgaaatatccgcttatatttcctcatctcgatggtttgcgaattaaaagttcttgaacccttttttcaactaggcactactgccgctgattgagctctttttgtcttttttttcaccatgaagatggtgaagcaggcgataaaacggcggcagcagggcaataaccagaatgacgcgaatgacctgaaccgcaacgacaaaggtggaatcagcatgtaaggtaacagacgtcgtcgccatctctgcaatcccgccgggcgcaaatgccagaacagaagtgatgagcgaaattcctgtcagctcggaaacgatcacggcgctcaaaaacattgctgcgattaaaccgacggacgagacaaacccgacgatgataatacgggtgacgccggcaaacatgcttttatacatcttagagccgatcgttgccccgagaaatacttgtgatacatggttagcttgtgacggccaccatgccgtcatgtcgtgccctgtcaccgcagctccgccaacatgtacaattgctacaccgagcatgctgccgagcagccatggagctggaaattttaaaaatttcgcagctttgcaagctccccaggcagcgagaataagaatgacggtccacaaaacgggagcgagcctaaaatctgtcgttgcagaagaaatcgtctctgctgcggcacttgcggtacgatcttgttttgtatagatcagaatgactaaaaacggaatggaaagcaccacgagcagcacacgcatcatttgaacgaggctgactattgcggtattggcgcctacttcctgtgcgatgctcggcatggcggaaagcccgccgggagcggtgccgacaaagctagtcatcatatccgttttgctgaaacgccaaagcacatatcctgacagcatggccagcaggatagacaatatcagcataacgccgactgaaaaccaatggtctttgagaacagagagaacggataaattcagcttttggcccaattcaatgccgaggatcatctgcccgagggcgagccatcgtcggttaattcctttttggtctggtgccatcatcagccatgccggccgtatcatggcgaggcagcaggcgacaatcagtgttccgatcatccatccaattgatattccggttaatgaaagaataaaccccccggctgcactgattgcgataaaccatagatctttgaggagattttcgtctttcttcaatgtaaaacccttcttcctttttcacgtaacactccaattgttcacgtagtgaatgtatttattactatagtatatttttgttgataaagaaattatgaattattttctataagcgattcacttttcttatgaccttgtgttcgagcttttctattgtgtaagtcagagataaacccgctgtcagcagacacacggcaagagcgtaaaaaatcacttctccgccaaatgatgtcaggatcagcccgcctgccagcggtccgattgagcgggatatatcccaatgcagaccatagacagcataaaaccggcccagcaaatgaggcggcgccaatttcgatatgaaggtctggatgtgggttagcccgatgctttcgccaaccgtcatcaccgctgccgtcactaaaagcattgtcagggaggttgagcatgcaaaaccggcagccgcaagggagtagcaaatataagtaatgaaaaggattgttttcattgaaagcttttcggtccctttgacaagaggtacttgaagaacacagctgaataaagcttttgctgctgaatagatggtcagcatggacagataatcagaaaacatgtttttgctgaacagcctgtatgttgtttctgattgtgcatataacatgctgatggggagagaaagcagcaaaagaagcaggacaggcctgtatatcgtaaagctcgcggacattttcggggtaacagctgggtgtagcggctttgtctcaggcagtttcagtgcagcgatcagaaagtagataaacaatgccgcagcatctaatgcgaatatccacacggggttatgattgtacagcagcatccccactagcggtcctgccgtcagacccgctgaatagatcgcattgatgaccgcaaacacttccgaacgtctgctttccggcgtgctttcagcgatttgggcgcgggaagcgggaatgtacaacgatcttccgatgccattcatgacatagagaatagcgaaaacatacgcatgctcagcaaatataaaccctgtcattgccgctgattgaagaagcaatgcggtcaaaatcgctgtgcgccgcccaatccggtccgccgcctttcctgcagcgagcgtcaggaaaatatcagcaaatggctgaaggctgatgatcagcattggcatcatgatactgccgtttaattgttcatgcagatacagcaccataaaaggtcccatcattgcacctgtcaggcttgtcagcaattcgccgaaaaagcggagccgaacgggagcggtatatctcgattttatagagtgaaaactggtcaacatgtgatcgccgcctttcgctgtttgatatagtagtagtgtatagaaggggcggcggcccaaaaagtgaagaaaagaagagataaaagttccccttttgtcgggaggtgcggggattgaagctgatagagcactacgtggcgcttgtaaaaacaggctgcgccgagtatggacaaatgaacgaaatgacactcactgagattgccgactgtttattttgtacagaaagaaatgcaaagctcattttacataagctggagaacagcaattggattatccggaaaagcggggcggggcgcggccgcaaatctaaaatcgcgtttcttcggaggcctgaggaactgcttcttcaaactgcaaaggaatataccatgtcaggaaagcttaaaaaggcaaagaagctgcttcagcagtatcagtccgcgtttccggggcttcaaaacgaatataacatgtggctttcagaggtattcggatttgtgacggagacaggcgagaatggggcgaaggatgttctgcggctgttcatcacgcccgaatctgtcagcagtttggatccatgccaaatatttttgcggtctgagggccatttcgtcaaacagatatttgatacactcttcacgtttgattcggatatgcaggagccaaagcctcatttggttcatggatgggaagaggtcgaaaaaaaacaatggagattttttcttcgaaaaggtgtgtcatttcataatggacagccgctgacatcgcgggacgttgcgtttacgtttcagcgctttttggaactgggtgacaacccgtataaatggcttctgcacggagtgaaacaagtcttagaaaagggcccttattgtgtggcgctcatactcgataggccgaatgcgcttttgccgtatgctctttgtgatgaacggctgtccatactgccggcagaacagggcggcgggaaaaatggaacagggccttttcaggtgaatcagcaacacagcgggatgcttgtgcttgaagccaatgagcgctacttcaagggacgcccctatttggatcgcgttgagtttgtgttttctgagcaagccggagagatgaacggttttaccattcaagaaaaacaaacatgtcctgagcagcaaactgtttttgatgagcggcatgttcagtatttgtcgctcaatctgaaaaagaaggggcctcttcagcaccaaagctttagaaaagcgctccggctgctgatttcctctgaacggctcgttcgtgaagcgggagggcaccgaagaatcccggttacgtcctttttgcatccgagttcttttgagtgggagggcgtttcgccatctgaattgttgaagaaaagcggttacgagggcgaaacaatcgtgctttataccttttcggaaacggatcatcgtgaggacgccgaatggattcaaaatatttgcgcccagcacggtatcaggcttacacttcaattctgtgatgctgctgatctgcgacggccggaaaccgtgcagatggcggatatcattcatgacagtgcgacgttttatcaagacagcgagtttggttttctgcatttgctgctgtcggagaacagtttcttgtatcagcatctatctgaaaagctgacacagatttgctcaggaatgatagagcggatgttttccatgcctgatcgctgttcgagaatcaacatcctgcgtgacattgaccggcagatgatacaggagctgaacgcgatcccgctgtatcaaaatgtgctccaggtgacatcaagtaaaaatgtaaaaggcctggtgcttgatgaagagggatggattgatttgtactccgtatggctgtccaaataaaaagagggttcttttttgaaccctcttttttaaactgccatgctgcggcattgttcagcacaggcgaagcaggctttcgcacatgcttggcaatgatcatgatcgtgctttccgcattcagtgccgcatgcttcacaaatatcggcgcaaagtgcacaaatttctttcataaacgggctgtccgtttgcatggctttgaccgccagcgcgcaaatatccgcgcattccctgtcaagccggatgcagccgctgagatgatgctgcacgctttcttgcaagcatttagtgaaacaatgattgcaagccttcatgcaatcgatgcaagcctcaatacaagcttcagaatattgctccatggttgattccccctgtatgacagtatatggttttatgtttcccggctgcatttgaaaaaaacaggggagtgtgtttttagctaaggggatatgtacatataccctgaacgggtatatctaaccatcagatagtataggaaccagacagcgtgattttgttcatcacgtgctgcgcgcgtaaagacgcctttcgcttttaagtttgacgtttcctcggccgcacgcaagtaaaagtcgacggtttcttgttcatctttaaaagcggcatccagtcctcttgtgaaattgtccgggcattcttccgtttgtttcggcatgatgtgtttgccggtaattgaaccatacagtgtggaaaattcacggaggtggcgaatctcgtcacgcctgatttcttcaatctgttttctgacctcatcgctgtgggcgagttcggcgagcttgcggtagcattgaatggcactgaattctccgttgatggccttctgcaaatttcgaatcaaaacaggatcttccctgtatggcaccggatagggatagtagctgtaatgcaaggggattcaactccattcttaggaattgggcttctgtaaaagtatatgttgggcagggagagatgtgcggagataatcagctttttatatgtgaaaaggccgtttttaccaatagatcagattggtcattttcgtcaacattcgataaaatatatagagataaaaagagaggggtcttctaatttgggagcagagtttttagtaggcaggtccgggagtggaaaaacgaagctgatcatcgacagcattcaggatgaattgcgccgggctccattcgggaagccgatcatttttctagtcccggatcaaatgacgtttttaatggaatacgagcttgctaaaacgccagatatgggcgggatgatacgcgctcaagtgttcagtttttcacgattggcctggcgcatcctccagcatacgggaggaatgagcaggccgtttctgacgagcaccggcgtacaaatgctcctgcggaagctcatagaggagcataaacaggagttcaaagtctatcaaaaagcgagtgacaaaagcgggtttaccgcacaggttgagcggatgctgacagagtttaagcgctattgtctggaaccggaggatatccgccggatggcggaaagcggaacggcttccgagtatcgcggagaacgtgttttatctgaaaagctccatgacttatcaattctgtatcagcaaatggaaaaaagcctcgcagatcaatatcttcactctgaggattatttgacattgctggcagagcatatcccgcttgcggaagatataaaaggcgcccatatctatgtggatggcttttatcagtttaccccgcaggaattcagggtgttggagcagcttatggttcatgcggagcatatcacgttttcgctcacagcggacaagccgtcatatgagcgggagccgcatgaactggaattgttcagaatgacggggaaaacctattaccgcctgcatcagaaggcgaaggaactgaatttggacattacgtataaagagctgagcgggactgagcggcatacaaagacgccggaattggcgcatctagaggcacagtatgaagcgcgtccggccattccatacgcagaaaaacaagaagcccttactgtgatgcaggccgcaaacagacgagctgagctggaaggcattgctcgggaaattcacgccctagtcagagagaagggatatcgctataaggatgtagcaattcttgcgcgccagccggaagactacaaggatatggtgaaggaagttttcgcagattacgagattccttatttcattgacggaaaagcatctatgctgaaccatccgttaattgaatttatccggtcgagccttgatgttctgaaagggaattggcgttatgaagcggtgtttcgctgcgtgaaaaccgaactgctattcccgctcaatgaaccgaaggccaaagtgagagaacaggtcgatcagctcgaaaattactgtatcgcctatggtattaaaggcgaccgctggacaaagggcgatcggttccaatacaggcgttttgtgtcattggatgatgattttgcgcagactgatcaggaaatcgaaatggaaaacatgttgaatgacacccgcgattggattgttccgccgctttttcagcttcaaaaacgcatgaaaaaagcgaagacggttcaagagaaggcggaggcgctctatcgttatttagaagagacggatgtgccgctgaagctggatcaggaaaggcagcgtgctgaggatgacggcagaattattgaagcgcagcaacatcagcaggcgtgggacgcagtcattcagctgcttgaggagtttgttgaaatgatgggagatgatgagatttctcttgatttgtttcagcaaatgatagaagccggcgcggagtcgcttacattttctctaattccgcctgcgcttgaccaggtgtttgtcggcaatatggatttgtccagaatgtatggcacctcctgcacctttgtgctcggggcaaacgacggcgttctgccggcacgccctgatgaaaacggggtcctgtcggatgacgaccgggaatggctgaaaacgattggggttgagctatcctcaggcggacgagagcgtttgcttgatgagcacttcctcatctacatggcgttttcaagtccgtctgaccggctttacgtatcgtatccgattgctgatgcagaaggaaaaacgcttttgccgtcgatgatcgttaagcggctggaagaactgtttccgcatcataaggagcgcctgttaacaaatgaacctgaacaggtcagcgatgaggaacagctgatgtatgtcgtgaataaaagcgtggcacagtcctttaccgcgagccagctcaggttatggacacgggaatacgacatcagcgacgtctggtggagcacgtacaatgtgctgatgagtgagccggacaggctgcagtcgaaaaagctgttctcaagcctgtttttccggaatgaagtgaagcagcttgaacgcagcgtgtcgagacagctctatggtgaacgcattcagggcagtgtatcgagaatggaaacctttaacgcatgcccgttttcccattttgcgtcacacgggctgcatttgaaggaacggcaattcttcaagcttgaagcaccggatatcggccagctgtttcattccagcttaaagctgatttctgataggctgcgtgagcaaaagctggattggcgcgatttaacgaaggagcagtgcgagctgttttcctatgatgcggtagagcggctggcaccgaaactgcaaaaggaaattctgctcagctcaaaccggcattattatgtgaaggaaaaactgcaaaaaattgtgacacgtgtgtccggcattttaagcgagcatgcgaaagcgagcggattcgtaccgatcgggcttgaactgggctttggaggaaaagggccgcttccgccgctgacctttcaactgaaaaacggctgtacgatggaactcgtcgggcgaattgaccgtgttgataaggctgaaagctcaaaaggcctgctcctcaggattgtcgattataaatcaagcgacaaaggccttgacttagcggaagtatattacggattggcactgcaaatgctgacgtaccttgatttatcgattacacattcagctgactggctcgggatgagggcgacgcctgccggagtgctgtatttccatattcatgacccgatgattcaatctaatctcccgcttgggcttgacgagattgaacaggagatctttaagaaatttaaaatgaagggcttgctcctcggtgatcaggaagtggttcgcctcatggatacaacccttcaagagggacgttcaaatatcataaacgccggcttgaaaaaagacggctctctcagatcagactcagcagcagtcggtgaaaaggaatttgatcttttgacaaagcatgtgcgccgcaccttccaagaagcgggcgaacaaatcaccgacgggcgcgtatccattgagccgtacaaaatgaagaacaagacgccgtgcacatactgtgcgttcaaatcagtatgccaatttgatgaatcactggaagaaaacgagtatcgcccattaaaggctgaaaaggacaagacaatacttgagtggataaaaaaggaggcggatggcaatgaacattcctaaaccggcagacagcacatggacagatgaccaatggaatgccattgtttcaaccggccaggatattcttgtggcagcggctgcgggctctggtaaaaccgctgtgctcgttgaacgaatgattcggaaaatcaccgcggaggaaaacccaatagatgtagaccgtcttctcgttgtgacatttacaaacgcctcagcggcagagatgaagcaccgaatcgcagaagccttggaaaaagagcttgtacagcgccccggctcgctgcatattagacgccagctgtctcttttaaaccgggccagcatttcgacgctccattccttttgcctgcaagtgctgaagaaatattactacttgatcgatcttgatccgggctttcggatagctgatcagacggaaggcgagctgatcggggatgaagtgcttgacgagctgtttgaagacgaatacgcaaagggcgaaaaggcgttttttgagcttgttgaccgctatacgacagaccggcatgatctggatctgcaatttctcgttaaacaggtgtacgagtattcccgatcccatcccaacccggaggcgtggctggaaagctttgttcatttgtatgatgtatcagaaaagagcgccatcgaggagctgccgttttatcaatatgtcaaagaagatattgcaatggtgcttaacggggcgaaggaaaagctcttgcgcgcgcttgagctgacgaaagcgccgggcggcccggcgccgcgtgctgacaattttcttgatgatcttgctcagattgatgaactgattcagcatcaggacgatttcagtgaactatataagcgggtgcccgccgtctcttttaagcgtgccaaagcagtaaaaggggatgagttcgatccagcgctccttgatgaggcgacagatttgaggaacggcgcaaaaaaactgcttgaaaagctcaaaaccgactacttcacgcgaagtcctgaacagcacttgaaaagcctagccgagatgaagcctgtcattgaaacgctcgtacagcttgtcatcagctatggaaaacgattcgaagctgcgaaacaggaaaaatcaatcatcgatttttcggatttggagcattactgtttagcgattttgacagctgagaatgacaaaggtgaacgtgagccgagcgaggctgcaaggttttatcaggaacagtttcatgaggtgctcgttgacgaatatcaggataccaacctcgtgcaggaatcgattctgcagctcgtcacaagcggtccggaggagactggtaacctgtttatggtaggagatgtcaaacagtcgatttatcgattcaggcttgcggagccgcttcttttcctctctaaatacaaacggtttacagagagcggagaaggcacggggcggaaaatcgatttaaataaaaatttccgaagccgggctgatattttagacagcacaaactttttatttaaacagctgatgggcggcaaaatcggtgaggtcgattatgacgagcaggctgagctgaagcttggtgcagcgtatccggacaatgacgagacggaaacagagctgctgctgatcgacaacgcagaagatacggatgcaagcgaggaagcagaagagcttgaaacggtgcagtttgaggcaaaagccatcgctaaggaaattcgtaagctgatttcatcgccgtttaaggtgtatgacggaaaaaagaaaacacatcgcaatattcaataccgagatatcgtgattttgctccgttcgatgccgtgggctccgcaaatcatggaggagctgagagcacagggcataccggtttacgccaatttaacgtcaggctatttcgaagcggtcgaagtcgccgtcgcgctttctgtgctgaaggtgattgataatccgtatcaggatataccgcttgcctctgtgctgcgctcaccgattgtcggagcagatgaaaacgagctgtctttgatccggcttgaaaataaaaaagcgccgtactatgaggcgatgaaagactacctggctgctggtgaccggagcgatgagctttatcaaaagttaaatacgttttacggacatctgcaaaaatggcgcgcgttttcgaaaaaccactcagtatctgagctgatttgggaagtgtaccgcgacaccaaatatatggattatgtcggcggcatgccgggcggaaaacagcgccaggccaatttgcgtgttctttatgacagggcgcgtcaatatgaatcaacggcatttcgcggcttgttccgtttcctgcggtttatcgaacgcatgcaggagcggggcgatgatcttggtacggcgagagcgctcagcgagcaggaggatgttgtccgcttaatgacgatccacagcagcaaagggctcgaatttccagtcgtgtttgtagcaggtctcggccggaatttcaacatgatggatttgaacaaatcgtacctgctggataaggagctcggatttggcacgaagtatattcatccgcaattacgcatcagctatccgacacttccgctcattgcgatgaagaaaaaaatgcgcagggagctgctgtcagaggaattgcgtgtgctctatgttgcattaacgagagcgaaggaaaagctgtttctgattggctcatgtaaggatcatcagaaacagcttgcaaaatggcaggcatccgcgtcccaaactgattggcttctgccggaatttgaccgctatcaggcgagaacgtatctagatttcattgggccggctcttgccaggcacagagacttgggggatttggctggtgtgccagcacacgctgacatctcaggtcacccggctcgttttgccgttcaaatgatccattcctatgatttgcttgatgatgatctggaagaaagaatggaagaaaaaagcgagcgcctagaagcgatccgccgaggtgaaccagttcccggctcgtttgcgtttgatgaaaaagcccgcgagcagctgagctggacctacccgcatcaagaagtgacgcaaattcggacaaagcaatcagtttctgagatcaagagaaaaagagagtacgaggatgaatacagcggcagggcccctgtaaaaccggctgatggaagcattctgtacagacgtcccgcttttatgatgaaaaaaggcctgacagcggcagagaaagggactgccatgcatacggttatgcagcatatcccgctgtcacatgtgccgtcgatagaagaagctgagcagacggttcacaggctttatgaaaaagagcttctcactgaagaacaaaaagacgctattgatatagaagaaatcgtgcaatttttccatacagaaatcggcggacagctgatcggtgctaagtggaaggaccgggaaataccattcagcttagcgcttccggccaaggagatctatcctgatgcacacgaggcagatgagccgcttttagtgcagggtattattgactgtctctatgaaactgaggacggattatatctattggattataagtcggaccggattgagggcaaattccagcatggatttgaaggagcggccccgatcttgaagaaacgatatgaaacgcaaattcagctgtacacgaaggcagtggagcaaattgcaaaaacaaaggtaaagggatgtgcgctttatttctttgacggagggcacattctgacattatagcgagatccataagctccggaatttcaggcggagcgggtctcgttttctatataaaagagaggtgaaagcatttgcggattttacatacggctgactggcatcttggaaaaacgcttgaaggaagaagcaggctgagtgaacaggccgatgtgctggatgaactgaatacgattgtaaaggatgagcagatcgatgccattgtaatggcgggggatgcatttgacaccgtaaacccgccagctttagccgagcagctgttttatgaaagcctgtctgcgcttagcgacagaggaaagcgcccgatcgtcgtcattgccggaaatcacgataatcctgaccgtttgtccgccgcttcaccgctgacacatgaaaacggcattcatttaatcggttatccgacaacagagccgattcatattgaagtgccttcagcaggagagcttttggcggttggagcgctggcgtacccatctgaagcgcggttaaatgaagtgctatccgatacgtttgatgaaaagctgctccgtgatcactatgatgtgaaaatcaggcaggcgtttgagcatatgacaagccggttccggaccgatgcagtgaagattgccgccagccatatttatgtggcaggcggaaaccaaaccgattcagagcggccgattgaagtcggcggtgcatacacggtggctgctgaaagcctgccggcagatgccgcttacgttgcgctcggccatttgcatcgcccgcaaacgatcaagcgggcgcggacgcttgcgcgttattcaggatctccgctcgcctacagcttttctgaagcgggctacgctaaatcagtgacgattgtggacgcaaagcctggggaagaggccacttggcaagaggtgttattatcaagcggcaagccacttgtgaagtggaaagcggcaaatggattaagtgaggtgtacagctggctggatgaaggcagagatcagaatgcttggattgacttggaaatccgtgtcgcggaccagctgtcacttgaagagattcacaggctgcggaaggcgcacccgggctttatccatatcaggccggtttttgaagaacagaacaaagaccgggaacggatcgaggttaaacatgtctcaatcgaggaccgctttaagaaattttatgaaaaacaaactggcggtgcggtgccggatgaagaaatggtgaagctgtttttagagcttgcatcaggcgttgaagaggaggatgcgaaatgaagccgatcgccttaagcattaaggggctccacagctttagagaggagcagacgatagattttgaaggcctttccggtgccggtgttttcggcattttcggcccgacaggaagcggtaaatcctctatactcgacgcaatgacgcttgctttatacggaaaggtggaacgggcggcgaataatacgcacggaatcttaaatcacgccgaagatacgctgtctgtgtcctttacctttgcgcttcagacgaatcaccaaatctcatacaaagtcgagcgtgtgtttaagagaacggatgaaatgaaggtaaaaacggcactttgccgcttcatcgaaatcaaggacgagcatacggtgctggctgataaagccagcgaagtgaataaaagagtggaggagctcttagggctgacgatcgacgattttacgagagcggtggtgctgccccaagggaaatttgctgaatttctgtctttaaaaggggcagagcgcaggcatatgcttcagcgtttatttaatttggagcaatatggagacaggcttgtgaaaaagctgagacggcaggcgcaggaagccaatgcgagaaaaaatgaaatgcttgctgaacagtccggtctcggtgaggcgagctcagaggcagtggagcaggctgaaaaggttctcgaacaagctgaagcccggctggaagcgatgaggaagaaccgtgatcaggcgaaggagcggtttacagagcatcaggagatatggaatgtccaaaaggaaaaatccacttatgaagaagaggaaaaacgtctcgcagaagaacagccgcatatagacagcatgcaaaaacgcctgctggaagcagaaacagcagcagcccttaaaccctatgcggaccggtacgcagaagcgatccagcatgaggagcaagctgaaaaggaacaaacgctagcccaaaaggatttagcagaccggacagctttctttcagcaaaaacatgaagagtatgaagcgtggcgccagcataaaagcgagaaagagcctgagcttttaacagagcaggaacagctttcacgcttgcaggaaatcgaaatcaaactgagtgaggccaagcaagaggaagagcgcaaaaaggctgacctccggcagaaagaagcggctcttcaatctgtcatgaatgaattagaggccgtaacagaccgcctgacacgagggcaaaacagacagacagaattgaaacagcagctcaaatccctgcaggtgacatccgatgagcgaaaaagctgccagcaggccgcagaaatggcattgcgcatcagacaaaccgaggagcaaatcaaaaaagagaaaaaacgaagtgaagaattgaacctcgtgctgcagaagatgaatgaagagaagaatacactcgttcaaaagacggaagcggaagaaaacaacatcattcaggcatatgaggctgtacaaactgtgtaccatttggtgtgcgaaacggaacgctcattaacacatatgacggaagaggctagaaagagtcaacacacgcttcacttacagcgtgaaaaagcaagggtggcactgctgacaaaagagttagcccaaaagctgactgccggtaagccttgcccggtatgcggttcaaccgatcatgatccatctgcctcagtacatgaaacatatgaagccgacagccatcttgaagaggacattaaacggacagatgtattattgacggaagctgcagctctcagccaggagattctttcagccaaaattacgcttgaagaacagtccgcgcgctttattgaacagtgtccgtttttgcagacaattcaagcacagaaccttgaagcggcagcttccttcgaacatcagccggtgtatgaagcatttgaaactgccaaatttgaatggaaacgaatcaagcaggacattctttctgttaagacacgaatggcacaaatgattggcgcctatcaggagtctttaaaaaaggccgagcagcttaatgaaaaaatcggttttgaaaaaagagaagctgaccgtattgaaagcatcatcagcgagcttcaatcctcaatggacagcagtctgaatatgtttaaagaagcatttcagaatcaatctgtggacgaagcagaaaaatggcagcaagccattgaagaaaaggaccgggctgcagaagaatgtgaaaaacgaattgagaagagtatcgcgtttcttgctgagcatgaagcacaaaaggaaaaactgcgggaatctggacaccggcttgaacgggaaaagctggagcttcattatgcggctgaacgcatcaagagcgtgatagctgattatgagcacgaactcggagattatgcaaaaggagattcgattcaaatcaaactccgctctgtccagcaggatctaaagctgttaaaggaaaaagaacaatctttatatgaagaactgcaaagcgcccaaatgaagctcaaccaagcgaaaagccgcgcttcggcaagcgagctcactcttcaagaggcgaagggcagattggaaaaagcaaaagctgcttggcttgagcatacaaaaaacacctccattacccggactgaggaggttgaacaaagtctcatcccagctgatgaacttgaaaagatgaaaaccggcatagaccagtttatggataaactgaagcaaaatgctgcaaacttaaaacgagtagcagagatacttgccggcagagcattatcagagagcgaatggaacgaaaccgttgcagcattacaaaaagctgaggacgcatttggcgctgctatagaggaaaaaggcgcggcagcaaaagcactggctgtcattcgcgaccatcataaacggtttaatgaaattgaagctgaactgaaaaaatggcagacgcatatcgacaggctggacaagctgcaagctgtgtttaaaggcaataccttcgttgaatttttagctgaggagcagcttgaaagcgttgcgagggacgcctcagcaagactcagtatgctgacaagacagcgctatgccatcgaagtagattcagaaggcggcttcgtgatgcgggatgacgcgaatggaggcgtaagacgcccggtttccagtttgtctggaggagagaccttcctcacctcgctttcacttgctcttgcgctgtctgctcagattcagcttcgcggggaatacccgctgcagttctttttcttagatgaaggcttcggcacactggatcaagatctgcttgatacggttgtaacggccttggaaaaacttcagtcagacaatctggctgtcggtgtcatcagccatgtgcaggaactgcgtgcacggcttccgaaaaagctgatcgtccatccggctgaaccgagcggccgcggtacgcgggtatcacttgagttgatgtaagggaggagcggatatggcaaagcagactgccggaatatgtgagctgtgcggccggagcgatgtccagctgacagagcatcatctcacaccgaaagaggaaggcggaacgtttttgccgacagcgatgctctgtattccttgtcataaacagattcatgccttatataccaatcaagagctcgccgtacgtttaaacggaatggctgaactcagaagcgatccagagcttgcccggtttgtcaaatggatcagaaaacagccgcctgagaagctgatcaaaacaaagaaatcaaatgaacgaaaaaagaaaaaatgactaaaaagcagccctctctttgcagagcggctgcttttatccgtttccaaccatatcctgatcgttgacatcggggtctatataatttgtcgcgttgactgcattatttaatagaaggaaatctcccgtgtttcctgctcccgaaccgagcgcagattttgaagagcttttcggagaaaggtaaaaggaatcaccaaagtttacgactccgcccgatatggaattgatagctataggcccgacaattgctggcataaacgacaccctttatcgaagtctctgtttattatatgttcttggcgggcgattgtgagcgcggagactgaatctgtctgatatgtttgagtctcgcatcaccgcgaataagcgaagctgatccggcatgtaaaacagaagaggctgagaccccttgaattttgatgctgcgaacataaatagccggcacctcgtggcaaaacgcgctttgtacacctgtttcggggagcggcttcacagcctgctgctgaaagatctgatactcctttttgttaaatgagccttcattatggtaaaacgtggacagagaacgctgcacagcaaatacttttacactcatatcgatttcatttgtgtcgccaacttgaaacacacttgcgatcccgagggaattaaacttaactagtctgatgcgcgatatgcgtttaagcattattctggcgcaagcggagcaaacggcccaataataagagattcaggcggtgtatcaaaaatagaagacaggtaaatggattcagtgtctccgatgtggaaaacggaggaactggacacaccgttcatccggatgtccccgacttctaagctgcggttgatgactgtaaagatcatgcttgctcatctcctttcatttctgatggaatatgctccagaaagtgttctacagcgcggatgacatcacgcttcacatgctcagcgatatgttctgcatattgtgcaggcggtgtatgttcttcttttttgatatgggacatataataatggattcggctgtccatttgttttctgatgtcttcaataacatgatgtctgtttgtatcgtcaagtctgctgtcatattggttttcaagctgttccaaaatatctgggatttcctcggttaagtacatgtcgacattctggcggatctgctgcatgagctgagcgctctcttcctgctgcatcatcccgatttgcggtgtcgactggctgacgtcaaagttttggacgctgttcgggtcagtcggatttaaaccgatgttcaaagtcccgtcgagcctttcgattttcagctgatcaaatttatactccacacgctcaatggtagtggccggccgctgtttcatcgtattcatttcagtttgaatctctttcagctgacgttcgagctgctgaatgtgaatcgcctgctgctgaacgaaggaattcaagttttgcaggtaagaggaaacagattgatcatacatgttcttcacctctttcatatgattaacggccaggaggctggagcgggaccaatgaacctgtgtcgggctcctgcagctggagcggttgccctgagccagaaacttctggtgccggttctacatagcttcctgtattatacaaatttgacagtgacttgattgatccggcgctcccgatttgcagaatggaggagttgctgattgattccagccggagatagttgatttgaatggtttgattaatatagaagttcatgagcctcactccttttacgcattggccacgatcggctgatcaaccgcatcattgtcatacacattcgtcgcgttttgataattcatcaccttgaggctgtcgccggtattaaagctgccagcaccggcaaacgttctgacctgagcctgaggagaaatcgtaatgcagtccccgatgtgaacgactccgctcgtaccaatcgcattaattttaaacgctccgacaatggccggcatacgagcacatcctttgttgaaaaattaaaaaaagacaggtaaagtgaaatgacaattctgatttcaattgggctattcacgatagcttatgacaaacgcacatatgtgtgagagaaatttaaaggggacatatcggctctttatgaaagcgctttattttttcgggccgttatgtttaaacatggcaaaagaggatgttgggtataaattgagcggaaatgcggcgaaggatgccgctatccgcctatggtgatttttgtttatttctttggtgtttttgcgtgtagaatgctttttggagtatgtcgtgctgcggtattcgatttttgggcgggcacattctcgccctgaggtatatcccagaagtgctgagcaaaaagcggagttacatgtggtgtattctaattgttatagaaaatgatttacatacgggagttttcaagatatctcccaaaaatcatttcttctttaatccgggtattcagcaggatatccagctcttggctgcattgaatcgtttcttttgaattcatgccatatttttgtgcggtttcaattagtgtgatcctcatttcttcaattttactgttcattacgctatctccaattctagattttattttgatataaatacaggatatcgttagtataacctattttggctcaaaaggttgcctttcgtcaatttgactaaaaaagcgacaatttttgctgcggccttttttaatggagaaaggactaaagtcttgctaagtgtgcttgcaaaaagtcctgccgttcctcaatttctctaagtatgttggtctgctccttttcgatttgaaaggggctttttttgataaaaggatcatcagcagcactttgacaaatgtcaaggtgccattcgttgatgagaggagataatcgttcaatagtaaacgaccgcttcagcacgtttttcattaaggtgtgatattgcgacctgaaggcgggaatggatagaagccttgacgaaagcgtctttccttttgtcagaagcgggtcttcttcataccattcttgtacggcaagcgatcttgtctccatcggggaaacgtaaagccgaccggattcgtttaaacaaaatgtgtagtaaaagccttgattggtgcaggcgttgccgatcagccacaaaaaaaacagcttgacatccagatacaatttaatcctttcagccaattcgtcatctccggctgtgcggatcagtatgaaaaattcatgtaagaatgccgagaaatcattgttaaaaagggacaatggaacccttggatcggccgtcttcactccgtaactccttttaccggctggctgatggttcttgatgttcaaataaatgccttcaggctggccattgatggtcagaaagctgtacgaggcaacgggagcaggtacgccgatctggtcaaaaaaacaataggcgagtctgcgccgcatcagggacggatcatcctgttctgcattcaaaaaaagtgtcctttcaccaagcagagacttttcccagctgatttcataggatgccttttccgctctgtcacgctgtgtgagaagaatgggagaaacagatcgatctgttacgaaaagccccttggctgtacctttccttttcagctgctcccgatgaaaaaataaatgcacgcgctccatattctttcctccttctcaaaacgacatttgtatgatatgtagagcaagcccgtcctgaaacgaaatgaaaacggaaaggagaaaaagggatttcagcattcgacagagaatacatgaaggagcattctgatttaaaagatgatggaggaataacatgaaatttgcgacaggggaactttacaaccgaatgtttgtcggcctgatcattgacgatgagaaaattatggatttgcaaaaggctgaaaaaaaactgtttgaacttgagacgattccgggatcgctgattgaatgtatcgcagaaggggataaattcgttgcgcatgcaaggcagctggccgagtgggcaaagaaaccgaatgatgagctgggatcatttatgtattcattatctgaggtgaagctccatgcacccattccgaagccatcaaaaaatatcatctgcatcggcaaaaactaccgggatcacgcgattgaaatggggagcgaggctgatattccggagcatccgatggtatttacaaaatcgccggtaacggttacggggcatggtgatatcgtaaagagccatgaagaggttacctcccagcttgattatgagggagaacttgctgtcgtgatcggaaaaagcgggacccgcatttcaaaagaagatgcatatgaccatgttttcggatatacgattgtgaatgatatcacggcgcgtgatctgcaaaaaaggcataagcagttttttatcggaaaaagcttggatacgacatgtccgatggggcccgtgcttgtacataaatcatctattcaggagccagagcgcctcaaggttgaaacaagagtcaacggcgagctgcgtcaatccggttcggcaagcgatatgatcttttccattccggaattaattgaaaccctctcaaaggggatgacgcttgaagcgggcgacattattgccaccggtacgccatctggtgtcggcaaggggtttactcctccaaaattcttgcggtcaggtgacaaaattgatattacaattgatccgatcggaacgctgtcaaaccaaattggctgaataaaactggagggcggacccggacccgcccgttttttctgataatcatctttgtggcagaggacaagttcatggtactataagtggggtaatttatctgatagggggaacatatatgacacacctacatattacgacatgggtggtagcgctgattctgcttttcgtcagctactcgctgtattcgtcaggaagtgcaaagggcgcaaaaatcactcatatgattctgcggttattctatatccttattattttgacaggagctgagctgtttgtccgtttcgccaactggaacggagaatacgccggcaaaatgattctgggcattatcaccatcggcctgatggaaatgctgctcatccgcaagaaaaaagaaaaatcaacaggaggcctgtgggtcggcttcgtcattgtccttttgctgacagtgctgctcggtctgcatttgccaattggttttcaattgttttaatagaaaaacctatgaacccggctctttgatagagttgggtttttttatatttatcccctcatattccaaatcatttaaaataaccttaaaattccctgtaagcggtatctcgtcctatgaaattatgataccttcaaggagattcattattttgcaggagggataacatgaaacgcagaaaattcagctcggttgtggcggcagtgcttatttttgcactgattttcagccttttttctccgggaaccaaagctgcagcggccggcgcgatcgatcaggcggctgctctggaaaacggcaaagagcagacaggcgccatgaaggagccggaacaggtgaaatggtacaaagtgaccccgggagcaacggatattcagaaaaactcacatatggcactgaccgtaaagagtgattcagtactgaatgtatctgtatatccaagtaaggaaaaagcgcttaaagatgagacgtttgagatgtaccgttctttcacagcggaggatggaaaaagcgaagtcatttttccatacgcgtggagcggcccttactatgtaaaagttgaatacctcggagaagaagagccagaggacggcggaacggcagaagcagctgcagaagccaagtatacgattgggtataaaggcaccaaaaaacagccgtcagatttagaagaggaagaagcttgtccggttgaaatgagtgtcgatcagaagaaatcaggaaaaggcatcctggataagctgagagcgattcgtgatgagcagctgagccaaacagcagaaggcaaagaactgacaagcctttattacaaagcagcaccgtttatcgttgcaaagctcgcactcaataaaacagcaagaaatgaaatctatcaggatcttgtgacattaaagccgttatttgacgatgtgtcagaaaacggagcatcatcttcgcataaggtcactgaaaaggatcaaaaagcaatcaaccggctatatgataaagctttacaatcagtcccgtcattccttaaagaggagataaagaaacaagcggaccgactaaatatgaagcagctgcaaggcaaaacagccggagccattttaacagaaaaccatattgcagcaaaaagtgaagttcagacaacaaaggttattttcaaggtgaaggacaataaaagcctctcatccgtacataatgaaatgaagggcttttctgcaagcgcgcaatcgaaaaaagacatatccaatgtgaaaaaggcaaagaaactgtttgacaatctgtattcatttgaacttccgaaagatgagaaacagaacggcgcatatacggcaagcgccaaaagggtcaaaagcgctgctgcgacactatccaagatgtccaatgtagagtttgcggaacccgtgcaggaatacaaaagcctggcaaacgacattcagtacccttatcaatggccgcttaaaaacaacggtgaaaacgggggtgtcaaaaatgcggatgtgaaatatgagcctgccaacacattgctgtccaaacgcaagcttaacgatacactcattgcagtagtagacacaggcgtagacagcacgcttgctgatttaaaaggaaaagtaagaacagatctcggacacaattttgtcggacggaataacaatgcaatggatgatcaggggcatgggacgcatgtcgcaggcattattgcggcccaaagcgataacggctattcaatgactggattgaatgccaaagcaaaaatcatcccggtaaaagtgcttgattccgcaggttccggagatactgaacaaattgctctcggcatcaaatatgctgctgacaaaggagcaaaggtgattaatttaagtttaggcggaggctacagccgcgtgcttgaatttgctttgaagtacgcagctgacaaaaatgtcttgattgccgcagccagcgggaatgatggagaaaatgccttatcttatccagcatcttctaaatatgtgatgtcagtcggcgcaacgaaccgcatggatatgaccgctgatttctctaactatggaaaaggtctggacatctctgctccagggtctgatatcccgagcttagtaccgaacggaaatgtcacgtacatgagcggaacgtctatggcgacgccgtatgctgccgctgctgcaggattgctgtttgctcaaaatcctaagctgaaaagaacagaagttgaggatatgttgaaaaagacggcagatgacatttcctttgaaagtgtcgatggcggagaagaagagttgtatgacgattatggcgatccgattgaaattccgaagacacctggtgtagactggcattcaggctacgggcggctgaatgtcatgaaggctgtcagcgcagctgatttacagcttaaggtcaacaagctggaaagcactcaaacagctgtcagaggaaacgcgaaggaaggcacacttatcgaggtgatgaacggcaaaaagaaactcggcagcgccaaagccggaaaagacaatgcgttcaaggtcaatatcgcgactcaaaaacaggatcaagtactgtatgtgaaagcaacaaaaggcgatgcgaaaacatcgtataaagttgtcgtcgtcaaaggaaaaccttccggcacaccgaaagtaaacgcggtgaaaacgaaggatacggcagtaaaagggaaggcaaacagcaaagcgatgatcagagtgaaaaacaaatcaaagaaagtcattgcttctgccaaagctgacgcaaaaggaacgttttcggtgaaaatcaaaaaacaaaaagccggaacggtgctgtacgtcacggctgcggatacagataaaaaagaaagcaaggaagcaaaagtggttgttgaaaagtaaccaaaaagcggtgctcgatgcaccgcttttttatttgcgcccccgttggactgctgaatacataatggatcgctttccgtttgaagccgtccattcaaaacggtctcctgtcccttcgctgctgtagtgatgctgcatcgcgcattgtgcggtgtcatttgaaaagtgataaaaggacacaccctgccccgccgaagtatccgaaaagactcctttattataagaaaagacgcaatcgaataccgataagccgaagctgtgcaagtgctgcagaaatgcgagaaaggtttcgtcgtcaagcgaatccaaaagcgccatgagaggccgcttgactgatttctcatagcggatgcgttctccgccggaaagggagatgttttctgcaccgcatgccaaaaccaacttgtcctgaaagccggcttgctcccactttcctttatgatggacccagattgggctgtgttggagactgtccgccagcagtatatcgccttcaccgttttcgattaagcagatgccgtcttcaatgaggatggtgccgtattcccactttcgttcctctgtatataacaattgtttccgtttcatccatgctgtctcctttttcttcattcctctcttttctttccaattcaagcctgtcccatacaactcttttatggacaaatcaactatctgcctatagatgcataaacttactaaggtgctgaaagaaacgaaattgttacgaaagaaacgggattggagctgatgtcacatgtgtggaattacgggttgggtcgattttaaaaagcagctcgtccaggaaaaacaaacgatggacagaatgacagacactctttccaaacgagggcctgatgattcaaacgtttggggggagcaccatgttttattcggacataaaagacttgcggttgttgatattgaaggcggacgccagccgatggcgtgtacctataaaggggatacgtacaccattatttacaatggcgagctttataacacggaagatttgcgcaaagaattgcgggcgcggggccatcaattcgagcgtacgtcagataccgaggtgcttctgcacagctacatcgagtggcaggaagactgtgtcgaccatctcaatggcatattcgctttcgctgtgtgggatgaaaagcgtaatctgctgtttgccgcgagagaccgtctcggcgtaaagccgtttttttacacgaaggaaggctcttcatttctcttcggttcggaaatcaaagcaatcctcgcgcaccctgatataaaagcgagagtggacagaacgggactttctgaaattttcggtcttggaccgtccagaaccccgggcactggcatatttaaaggcataaaagaaatccgcccggctcacgcgctgacattttccaaagacggacttaatatttggcgttattggaatgttgaaagcgaaaaacatacggacagttttgatgacacggttgccaatgtcagatcgttatttcaggacgcggtgacgcggcagcttgtgtcggatgtgccggtttgcacattcctatcaggcggtctggactcaagcgcaattacagcgattgcggcgggccattttgaaaaggaaggaaaagcaccgcttcatacttattcgattgattacgaagagaacgataaattttttcaagcaagcgcttttcagccgaatgatgacggaccatggattgaaaaaatgacagaggctttcggcacaacgcaccacaaatgcgtcatcagccaaaaagatctcgttgatcatttggaggaagctgtactggtcaaagacttgccgggaatggcggatgtcgactcatccctgctgtggttttgccgggaaatcaaaaaggactttgtcgtcagcctatcgggagagtgcgcggatgagattttcggcgggtacccgtggttccatacggcagatgttgagtctggctttccatggatgagatcaacggaggagcggatcaagctgctttctgactcatggcagaaaaaattgaatctgaaagaatacgtaaatgccaaatatgaagaaaccttggcagaaacgccattattagacggagaaacgggtgtggataaagcaagaagacagctgttctatttaaatatgctttggtttatgacgaaccttttggatcggaaggatcgcatgagcatgggggcgagcctggaagtgcgggtgccgttcgccgatcaccggcttgtggaatatgtttggaatattccgtgggaaatgaaaatgcatgataatcgggaaaaaggcattttacgcaaagcgcttgaaggtattttgcctgatgacattctgtatcgcaaaaaaagcccgtatccgaaaacacatcatccggaatatacaaaaggcgtcagcgaatggctgaaaacgatcagaagccaaaaggactccgtgctccataccttgctggacagaaaacaattagatcagcttttagaaacggaaggctcctctttcaaggtgccgtggttcgggcagctcatgaaggggcctcagctgatcgcccatcttgctcaaattcatacatggtttgaagcgtatcgcattgatattgacgagaggtaggttcaatgcaaatgtgattaaaagccagagatgtatagatttaaataagaaggatagatgagcagggaaatatatgctctatctatccttttttgtacaacagcactatcgaattgcccccgcattccttcaataagaatgaataggttttaatgttctgccgataaaactagctgataccgggcttaactttaattccctagcccatacagaaagttgaccaatatggtgaatttcgtgagcgatgatatggtgtaatatttcatctcgcgtatataaaacacttgtctcccaaggaacgcttacaagttcatcttttatttgatctgaatgtgtttgtaaaacatcaattatttcagttcggaatgtatttgagagagatttcactttattgagtgtttgataatcagcgaactgaacagcgatatcttcttttccttggatagcacgaatccaactatattccacatcaataatatgaaaaagggtatataaaatattctctactccgccaagacggtttttaagtaattcttcagtggttagttgatgacaccaagtaaaccattgatctctaacctgccagttatattcaaaaaattttatcactgaactcactccaatactatcatgtatcataacaattagcccttttttccgtgattcctctattattgaagtgatgattgagaaatgtttacattctacctgttgtatggcattaaaaataataatgcatatctcgtcgatgatgctgtgcgtcttgttacttttacaaagtaagaatcggcattttcttcatatacaattaggaaaaaacatactagacttgaagaagcagtgatacataggagtgagaaaatgaaagagataaaagaagcttaccagcaatgcggacagattgttggcgaatacgcgccagcctgtttcaaagcattatcatatctcccgctaaagcaaagacaagcctcttgggcagtattgtcgttttgccacacggcggccagtgcagacgaaaaggtattgcccgcatttgaagctaaagctgatcatgtttaccaaaggacaaataacggtaaacaacatctatggaaggcttttgatcatgcgtatcggacctttacattggaaagcgaaccttttcgggagtttattgccgcacaaaaagaagacgccaagccgtatgatgaccttgatgaactgctcatgtacgcatatcggacgggcggtgctgccggattgatgctgctgccgatactgacacgccgaaaacaagatcagctcaaacaagcagccgtctctctcggcttggccatacagctggttcgcttcttaagtgatcttggcacagatcagcaaaaaaaccgcattccccgtcaggtaatgcagcaattcggctatacagaggctgatctccaaaaaggcaccgtaaataaagcgttcacaatgacgtgggagtatatcgcttttgaagcagaagcctaccttgaagagtgtcaggatgccttgccgctatttccgcagtattctcaaaaaacggtgaaagccgctcttcatttgcaccgggctgttttagaaaaaatccgggcgaagcagcacgatgtatttcaatatcacttcgctctcacagagaccgaagtgaagcagattctgtctgatatctaaaaaacacccggccttgattgagccgggtgttacgccatacctttttgaatccagatacgtgagcgccatcttctgtacattaagattccccggacccattcatccgcgataaaagaaatccaaatgccggcaagaccgaaaccgaggtggatgccgaaaagataagcaagcgggaggccgatgccccacattgaaatcattgccatgtaaaccgggaatttcgcatcccccgcagcccgcagagagttaatgataatgacattaaacgagcggcctggttcaagaataatggtcatggcaatcaataggcttgcagttgctataatgtcagggctttgtgtgaagagtccgatcaggtcttttgaaaagatcgtcatcaaaacagaggtagccgcagcaattccgagtgcccaatataagctcttcatgcagcgctcataagcggcatcaaattgtttgccgccgatataacggccgattaagatttgtgtaccctggctgatcgcagtgccgaacagcaaaataaacatcgtaatattttgcgtatacacttttgttgtcaacgcctgcgcgcccatgatggcgataaaatacgtgacaatcatttgcgaaaggttgtatgaaagctgctctcccgcagaaggaatgccgattttcagcagcttgcgcaaatgctctttatgcatatgaaagacttttttcagcgacatcttcagctggatgcgtttgttgacaatcacaatcatcgcgattaatccgatgacgcgggcgatagatgtggacatggccacaccggtaacgccgagaacaggaaagccgaacaaaccgaaaatcacaacaaagtttccggcaatgtttaaaatgttcatgccgatagtgacaaacattgtatcttttgtgtagccgtagctttttaagatcgcgctgaatgtcatgattaaagcctgaataaaggacagacctccgacaacttgtaaaaagactttcgcatcaggcatcagtgcgtctgataatcccatcatatgaagcagagggacagccgcgaaaaagacgacggcgctgatggccaggctgatgaagaagttggcgccgattgacacataagcgacttccatggcttctttcttttgccgtgagcctagaaattgtgaaatgataacggtcgttcctgttgcgataaagctgaacatcacgataattaaatttaaaatctggttgctgacgccgactgctgccacgctgttatccgagtattggctgagcatcagtgtatcggcattacccataaacatatataatgagacctcaataaagatcggccaagtaagcgaaaataatgagaacgttttgtcagcgggttttttcaaagcagttgatttgaagacagcttgtttcatagtgtctaacccctttcgtaaataaaatcaacgttttaaagtgtacctccatttccttataataaaaagggatagaaacgatacttcttgtaaaaatccgacttaaaaaggaggatgattcaaatgccccgcatcctgtttacagtcccgccttttccggtatttattgcagctggggaaggggtttttaaaaaaggagaaacccatgtgaaacgtgtattctccgtgtttgatctgatatatgtcaaacagggaacgttatatataacggaaaatgaaacatcgttttctgttgaaggcggcgagtacatcttgctttctcccggtcttgaacactacgggacgaagggcagtgatgaagcaacctcctactattggcttcacttcgatgaacatcgatatgaatttacggcaaagggaggcagcaactggtctgagcttcagcaggaaaaagggagcttcgaagagccggcccgctacggattggctttgccgagaaaaggcaaggtgcagcgcccgcagtttatggcgcagcagtttgaaaagctgatcgattactccgcggaaaactctgatttgcccctcagaaagcaaatcttatttgaggagctgatgctgcatcttcaaaaagaagcgttccaaataccgtctgcgaaagagcgggtagcctgggaggcggcccggtacttacaggagcactataaggaaaagacgacaatcaaggatctgtcgctcgcccttcactatcatcaggattatgtgagccgctgcatgcagcaggtgctcggcgtaactccggcacaatacacgaaccgggtgagaatgacggaagcgaagcgtcttttatcctctacaaatgataaaatgggcgttattgcggaaacggtcggaatggaagatccgacatacttttcaaaactctttaagcagatagaaggcatttcaccaattgaataccggaaaattgtcagccggaaagttcaataaccagacgagggatgaacatgaaaacaacaatttacgatgtggcaaaggcggcgggtgtctcgatcacaactgtgtcccgtgtgataaacaatacggggagaatcagcgataaaacacggcagaaggtcatgaatgtcatgaatgaaatggcatacacgcccaatgttcacgccgcggcgttaacgggaaaacgaacgaatatgattgctctcgtggcgcctgatatttcaaatccgttttacggcgaactggccaaaagcattgaggaaagagcggatgagctcggttttcaaatgttgatttgcagcaccgattacgatccgaaaaaagaaacaaagtatttttctgtgctgaaacagaaaaaggtggatggcattatttttgcaacagggattgaaagccatgacagtatgtctgctttggaggaaatcgccagtgaacaaattccgattgccatgatttctcaggataagccgcttcttccgatggatattgttgtgatagatgacgttcgtggcggatatgaggctgccaagcatcttctgtcactcggccacacgaacatcgcctgcattattggagacgggtcaacgacaggcgaaaaaaatagaatcaaaggcttccgtcaggcgatggaggaagcgggcgtgcccattgatgaatcacttatcatccagacgcggttttccttggaaagcggcaaggaagaagcgggaaaattgctcgacagaaacgctccgactgctatttttgccttcaacgacgtattggcttgtgccgccatacaagctgcgagaataagaggcataaaagtgccggatgatctttctatcattggttttgataatacgatactcgcagaaatggcggctccgcccctgacaaccgtagcccagccgataaaagagatggggcggagcgtcatcgaactgctggcagaagcaatagagggaaaacgaaaggcgaaacaaaaaatagtgctcccgcctgagcttgtagtcagacattctacatcaccgctcaacacatgagcccgctaatgagcgggttttttcattatgacagttgaagccaaaaaaacatattgcgtgtaaaccaaaggcagtgtaaaatgaaaccatcttttgagaaagcgcttgcgcaaaatggcagagcggatagaaccgctgtttttttagctgttaagagaaagcgctttcccaaagcgagcccgaaatgagataaaggagaggatgggacgtggaacatcaagtaaggtgcgcagtattgggattaggaaggctcggttattatcatgcgaaaaatctcgtcaccagtgtgccgggggcaaagctggtttgtgtcggtgatccgttaaaagggagagcggagcaggttgccagagaactcggtatcgaaaaatggtcagaggacccgtatgaagtgttagaagataccggcattgacgctgtcattatcgtaacgccgacaagcacacatggtgatatgatcatcaaagctgccgagaacggcaaacagatctttgttgaaaaaccgctgacattaagccttgaggaatctagagcagtttctgaaaaagtgcaggagacaggtgtcatctgccaagtcggctttatgagacggttcgatccagcatacgcagatgccaaacggcggatcgacgctggagaaatcggcaaacctatctattataaaggctttacgcgcgaccaaggcgcgcctcccgcagaatttatcaaacacagcggtgggatttttatcgactgttccatccatgactatgatattgcccgttatttgctaggggcggaaattacttctgtttcaggacacggcaggattctgaacaatccgtttatggagcagtacggcgatgtggatcaggcgctgacgtatattgaatttgactccggcgcagcgggggacgtcgaggcaagcagaacctctccatatggacatgacattcgggcggaggtgatcgggacagagggcagtattttcatagggacattgagacatcaacatgtgaccatcctatcggctaaagggagcagttttgatatcattccagactttcaaactcgttttcatgaagcctactgcttggagcttcagcatttcgccgagtgtgtccggaatggaaaaacaccgattgtgacagatattgatgcgacgatcaatttagaagtgggtatcgccgcaaccaattcctttcgaatcggcaggccggtacagctagatgtgaagcacgcttatacaggtatgtaaaagctaaatatgttgcattttaggctttccgcaaaaaaaagcaaggacatttttagcccttgctttctcttttctcatataaatagtacatataatcagtaggtatgcctgaatggcccagctgtctcagcatggcggttacgttacctctatggtaagtcccgtgattgacgacatgcaggatggtgtctgcataggttgattccagtgtacctagtttcggatgctgcattgtgaaggtctgttctaagtccgtctggcggctgaagaaatcatgatactgtgactccagctcggcagcgtgctgtttaatcgctgccatattaccttgcgcggactctaatttgcctgcgctgtctataatctcttggtaggccactcccgaaagaacattcagccaaatgtagtcagccctgcacatatgaagcagcacgtcgctgacagaaggaaatacgctctttacttcttgataggcagtttcctccggcaggttttcgatatgggtaaatattttcttgtttgcccaagaatgatagtcataaaactgttttgcatcagtcatcagcatgcccccttttctaagaaattcgtttttttcatctgtttctccttcaattgcaaaagagtgacaccccaaaatatcctgccgctgcccacataaccgctgcagagcatttgtttacgatcagcataagcctgccgctcgtatctatcgtctgaaacaaccggcccgctattgcaaggctgataaaccaaatccaagacacagcgatgcaggcggccataaagagccatttctcaagccccgaatattgaagagagctcgtgccgatgacgccgatcgtgtccagaatggcatgcgggtttaaaagagaaacagcggccgcaaacgcagcttgcttttttggtgtgaacgtatgtttctcattttggcttgtgttcggacggctgttccaagtcacccagcccatataaagcaaaaataaaaatccgccggccatcatgactgtctcaaacacaggcagctcctgcacaatgacagacacgcccgcaacggctaatacgattaacagggtatcgcagactgaagcactgatgacagctgggagagcccgccaaatatgcttttgccacgcgccttgctgaaaaataaacacattctgcactcccagcggcaaaattaagccaaacgcgagcacaattccgtgaatgattgcattcatgctgaaaaagctcccttcacatttttttcaatcataagagagattgtcactaaagtctccagccatttggttgggttagaaaccagccaaatgtataatgtgtaaaaaaggggggcatgaccttgtcgcaatggcagccaagccgaaagtcggatgttccgctgcatcggcagatcgaacaatatatgaaagacaagattcttcacggagagtgggctgtagggacgaaaatcccctcacagagaacgctggccggcatgtttcaagtcaaccgcagcacagtcacagcagccatagatgaactcacgtctcaaggcttgttagagggaagaagaggcggcggtacgaaggttgtaaacagtacttggagcgtgctggcggctgagcctccgcttgattggagcgattacgtccgttcgggcattcatcgcgccaattcttccatcattcaagctattaatcagaacgaaccaagagcggatatcatcagattaggaactggagaactttcaccggatcttgtgcctgctgacacaattggacggatgtttcagcaaatcaatccgggcgccctgtctttaggatatgagcagccgaaaggaaaccgtcagctgcgggaggcagtagccgaccatttaaaaggaaagaagatccatgtgtcaccgtctgcaattttaattgtgtccggtgcacttcaggcacttcagctcatctcaattggacttttaaaacgagattctgtcattttgacggagaagccgtcctaccttcaatccttgcatgtatttcaatcagctgggatgcggcttcgcggcttgccgatggatgatgaaggggtcaaagcggggcttgtttcttctaatcgaaaacaatatggaggacagctgctttacacgattccgtcgtttcataatccgacaggcacagtcatgtcagagcagcgaaggaaagagatcatcagcctgtcaaaaaaagagcagctgcccatcattgaggatgatgcgtacggtgatttatggtttgaagaaaaaccgccgcagccgttgaaagcaatggatcatgagggcaatattctgtatctgggcacgttttcaaaaacggttagccccggtctgcgaatcggctggcttgccggtccggagccggttattgaaaggctggcggacattaaaatgcagacagactacggatcaagcggcctgtcccagtgggcggctgccgagtggctgtcacaggggtattatgaagagcatctgacttgggtacgcaggaagcttaaagaaaggagagacgcagccgttcattttctcgagcggtatgccggggacattgccacgtggcggattcccgcaggcggcttttatatttgggtgacatttcacaaaaacctgcctgtcagccgtttcttttatggattgctgaaacggcaggtgcttgtgaatcccggctacatttatgacggtgaagaccgaaacagcatcaggctgtcatattcctatgcatctcttggagatttggaaactggcattaaagcggcagctgaaacagcacgctgcctgatgatgtcctaagctttggttatacgatgacagctcccagtgccctggcgaaggcaatcgcgtgctcaggtgcgattttgcagcctttcaatttgtcgagggagacatgaagctgttcaaaacggcacgtgctgatgtccatgttttgaagggatgtgccggtaaagctggcgccttccaattcgcatccgtcaaagtgtgtctgctggagcaccgtattgctgcattcactttgcataagagcacagtgatcaaatcgaacttgtttcatatttgagtacgaaaatgagctgaaatgtccgtggcattcctcgaatgaaacatttcgcagcgttgcttccgccacattcattccaaccatttttgactgcttaacagaagttctgtgaatgacagccccgctgaaatcggcgtttgataaatcacatttttcaaagatcacatcggtcagttcaatatgccgaaaagacacatcgataaagacgacatttctgaataccgttttttcaacacagagtctttcgatatcttcgccgcagattgtacaatcttcaaacaaatgcatgctgattacatcatcctgcgtcacggcatcatgaaaatctgcggtttgcaggttttccggtatgttcggtttttgaattgcgattttattcatgtgatgacatcctttgctgcccgaaaaacagaggcttccgggttcaatttaatagatcgttaaggaaattgatacatatagtaaatcgtgaagagccttttcttggtacagcagccagcttgttttgtaagcataaatggaaagcttcctatacgtcaaggcgtttacaggccgggaaagccaaagggaacaggaggaatgcggaatggggcattacatcaaaaccgaggagcatgtgacactgtttgtagaggatatcggacatggaaggccgatcatctttttgcacgggtggccgttgaatcataagatgtttgaatatcaaatgaatgagcttccgaaaaggggatttcgttttatcggcgttgatttacggggatatgggcaatctgaccgcccttgggaaggctacgattatgacacgatggccgatgatgtgaaagcagtcatttatacgctgcagcttgagaatgcgattcttgccggtttttcaatgggcggcgccattgcaatccgttatatggcaaggcatgaaggagccgatgttgataagctgattttactgtctgcggcggcccccgcgtttacaaaacgcccgggttatccgtacgggatgaggaagcaggatattgacgatatgattgaattgttcaaagctgatcggcccaaaacactggctgatttagggaaacagttttttgagaaaaaagtgtctccagagcttagacagtggtttctcaatctgatgctggaggcctcctcctacgggacgatccactcgggcatcgcattaagagacgaagatctcagaaaggaacttgctgcaatcaaggtgccgacgctgatcctgcacgggagaaaggatagaattgcgccgtttgattttgcgaaagaattgaagcgcggcatcaaacagtcggaattggttccgtttgcaaacagcgggcacggagcattttatgaggaaaaagagaagatcaacagtttgattgcgcagttctccaactcataagaaaaaacccgacattgatcgggttttttatataattcctctgttttgcagtgcgttaatgatgagatcagctccatcggaaatagaggtctggtctgactcaatgatgaaatcgggtgaaagcggcgcttcatacggagaatcgatcccggtgaaatgtttgatctctccgtttcgcgcttttttataaagcccttttggatcgcgctgttcacaaacatgcagcgggcacttcacataaatttcgaagaactcacctttaggaaagagcgctctaaccatgtcccgatcctctctgaatggagaaataaaagccgttaaaatcatttgcccgctgtcgacaaacagcttcgccacttctccgatccggcggatgttttcaatcctgtcaccagtctgaaatccaagatctttgtttaagccgtggcggatattatcaccgtcaagcacgtagctctgaatgcccttgcggtaaagcttttcatcgacagcattggccagcaccgattttccggagccggacaaacctgtaaaccaaaggacgcagcttttgtgtccgtttaaggactgtctgtcagactttgagatggcagcgggatgccaaatgatgttcggattgtgtgtcattgcaattccccgctgttttgcttgatggcaacaggctgttggtgaagtcccttgatcagcacggctgcgacctcaggccggctgaattctttaggcggctttttgccttggcggagaagctctctcacttttgtgcctgataagtggatgtggtctctcgggctgtgcggacatgttttggaggtgcccatgtttccgcattttcggcaataaaagctgtgctcaaaaaacagcggcttgatgcccagctcttcctctgtgaatgattgaaaaatattttgggcgtcgtatgttccatagtagctgccgacacccgcgtgatcacggcctacaataaaatgggtgcagccgtaattttttcggacgagcgcatggaaaatcgcttcccgcggacctgcataacgcatggcggcagggaaaaccgataacatgacacgatcctttggataatagtgattaagcaaagcctggtagctctccattctgatatcgctggggatatcgtctgactttgtttctccgacaagcgggtgaagcagcagaccgtcgaccgtttctaacgctgttttttgaatgtattcatgcgctctgtgaacagggttcctggtttgaaagccgacaatcgtcttccagccgagttttttaaaggcggctcttgtttcagcgggcgttgcataaaactgttcgaaagatttgtcaggcaggcggctgaccgtgataggccctccgatatagtaatccgggcgcgccagcaatttttttacgcctgggtgggcaggatcgtttgttttaaaaacagacagtgcttcttgtgttttatcaggctggtatatatcggtgactgtgatcatgccgtaggtaacaccgtctttcacaagcttgacgtgatctccggcagacagctgttttgctgttttttctccgacaggcagcgtaatcggcaggctccacggcaagccgtttgccagcctcatttctttcacaacacgatgataatctttttccccaaaaaaacctgttaacgggctgtatccgccgatcgcgataagctccagatcactcagtgcaagctgatccagctctgcttggcacgcgcacccttcaaaatggcatgcgggatcacagcggttgattaatacccctccatggggttcgtttccattcaacgtgttcaacctccatttatacgtttccttgttttcttttctgcagttaatgaaagtttgacatcagcgtctcaacatcatttcgattctcacatcaagaacctgccatccgctattcctgatgcaggccgcattctgttttctcccgtccggcccatcttccagccctctcatcgttcgggtccggggaaggcagtgtacacatttcacagcctatgctcggataatgttgatcgtgcagtttgttataaggcaaattgtgcaggcggatgtacgtccaaacgtcatcccatgtccagtggataagcgggcaaattttgatgagctcaaacttctggtccaggtttacgtattgaatatgctttctcgttggtgactgatcccggcgcagtcctgaaatccaagctgtcatgccggacaggtgctttttgagcggttcgattttccgcaattggcagcagaggttcgggttatgcttccacagctctccgccgtacttcgtcccctgttctgttaagctcagctcgggttcgagcatctggattgcaaatcccggatatcgctctttgacggtctcgatcagctcatatgtttcctgaaaatgaagcccggtatccaaaaagatgatgtgtgcatttttgttgatttttgatattaagtcgagaagcaccattccttctgcgccaaagctgcaggcatacacaatcttttctccgtacgttcggtaagcccatttcaacacatcgagctcatcgatcaattgatccgttatccgtttggacagcatgtcgttccatgtgtcatatgtgatggtttcgttcaatgttttccccccgtttgcatctgctttttttatctattgatcgagttataggcagactattcattttttgcataaaggttcaggttttaggtgccgcgcccgcctaaaatgaggtgcggaaccattaagagcccggctgaatatgctttttagcaaaatggttttatgcccaaggagaggtagtatgccgattgccatttatcaggggcatcatcattcgcttgccccggcggacattaacatcgtcattgatgtcatcagagcctttacggtcgcccattatgcgtttatcggcggggcgaaagagattttgttggtccggacagctgatgaagcctttgcgctgaaagacacctatccggattatgttttgacgggagaggaaaagggggtcggtatcagcggatttgatttagataattctccaaaacgtatggctgggcagaatatgacggataaaagcctgatccagaaaacaacaaacggcgtcacagcagcattgggggcgctgaacgcaaagcatctgttcgtaactggattttccaatgccaaaacaacggcacagcatgtgaaaaagctcgtcgcaaacgattgtgtcataaacatagtggcttcccatccatccggtgatgacgatatggcatgtgcggagtatatcaaaggcatcattgaagggacaaatgtggtaacggctgcggaggcgattgaaagaataaaaggctcttctgttgcggagaagttttttgactgccgccagccattgtttgattcggaagacatcgtttactgtacaaaagaactgacgggcgatttcgtgatgaaagtgaaacaagatggagaagttccaacgatagagagggtcataatatgaatgatttttcactagaattgccagtgagaacaaacaagccgagagaaaccgggcagtccattttaattgataacggctatcccttgcaatttttcaaagatgcgatagccggagcgtccgactatattgattttgtgaaattcggctggggcacctcattacttacgaaagatcttgaagaaaaaatcagcacactgaaagaacatgacattacatttttctttggcggcacactgtttgaaaagtacgtaagccagaaaaaagtgaatgaatttcatcggtactgcacctatttcggctgtgaatatattgagatttcaaacggtacgctcccgatgacaaataaagagaaagcggcttacattgccgatttttctgatgaatttcttgtgctcagtgaggtgggcagcaaggatgcggaattagcaagccggcaaagctctgaggaatggcttgaatatatcgttgaggatatggaagcgggcgcggaaaaagtgattacagaagccagagaaagcggaacgggagggatctgttccagcagcggcgatgtcaggtttcaaattgttgacgacatcatttcctcggatattgatatcaacaggctgatttttgaagcgcctaacaaaacgcttcagcaagggtttattcaaaaaatcgggccgaatgtgaatctggccaatattccatttcatgatgccatcgcgttggaaacgctgcgtttagggctaagatccgataccttttttctgtaaaatagcggctgcggggctctcgtcgtgaagagagcctctgcctattattttttatggcggtacataggcgtgagatagggaagtgaggtcaggcggatgttgtagatgaagtcgatgactcttgtcgatatcacctggcatatgagggcttgaatgacgatgccccagtcaataatagacgcggtgaccataaaaatgatgcaattcatgatgagcaggatcgttccaggattcccgccgcggtagatagaaatcatcagagcaagggctccgaatcctccgttcgaaattttatatttgtataaaagtccgattccgagtcccaataacactgcgccgcttgccagatcaagccacaggttagatgtgatatcaggaaaaactgcatcaaagatcaataccgagacagaggtgacggtgatagaagcgagggtgccggtgaatgttctcatctccagccattttaaagcggtaaaaagcattgatacattcacagcccacactgaaaatccgtgggggatttgaaacagataatgcaatagcaccgcaatacctgctgcaccgcctgtcggaatatcatgcggaaataaaaacaaggacatgccgagtccctgtagtacgccgcctacgacaatcataaacgtaagttttgctttcatcagcagttcagccattaagtcatttgctcctttatgaaaagacttgtccgctgttttcattttatgaggctgtccattatttatgtctcaaaataaagaaatggcccagcttaataggctgagccatcccacttgtagcgattgacgatctccatattgatctctgtgccaatgccttttcctttcgggatgtggaccattccttttgaaggctgcaggctgacgagatctgtaaaaggattctccatgacgtcccactcgatcggttcaatgtgatcgtacttcattttagaccatgggggcagacaggcttgtgcaaataaagcatagagccgtgaaagcgatccgtcatatgcatgggcggatgctctgacgccgaaataacgcgtgagctggaggcagtcccgaaactcatcaattccgttgacatgcatgacatcgggctgaatgatatccaaacagcgctgtgaaaggagaggcacatattgcgccgggcctttcatgttttctccgccggcaacaggaacagacaaacggcttcgaagcatagcgtaatcctgcggctgatcaaagggcaaaggctcctcaagccagccaatgttcgtccattcggagaaatagcgctcccatttaaaagccgcagcggtatcgtagctttggtttgcgtccagaatcatcgtaatggagctgcctgctgtatgctgcagcgcattgatgtgccggacatcctctttgaatgaagtcccgccaattttgactttgatttgctcaaaaccttttttcaactgggcttcaacattggagactgagcggctgatccattgcggggagtctgagtacgattgaaaagacgcgtacacaggaatctcctctctgtatcgcccgccccataattcgcaaaccgaacaatccgcagctttggctgcaatctctgtcagcgccatgcttacagcggaggccgcccgctggtgccatttttgaatcgtgcgcactaatgacaggcggctgccagcctgttttcctaaaagaaacgggatgatccgtttcgtaaaaccgacatggagagcagggagccaatcaacacattctccccagccgtctatcccgctttcggtgataatcctgatcagataacaagtccgatatcgtttaagcccgttggcgtctccgtatggcttgtttaatcggtgcaagagcggaaaggtttcaatgcgtacaatcttcaaaccgtgtgctacctttcctcagcgggctgcagccgattgccagccattttagggtcttctttctcttttgtttcttcattattttgcttcacatggattaacatcatcacaagaatgccgacaacgagagtcaatcccgcaatgcttaaaaacatgccgggtctggaccattgcatcaggcggccgaaaatcggagggccgattgctacccctaagaagcgtacagatccgtacagcgaggtgacaaatccccgtctttccttgccgacagccccggtaatgaaactgttcacacaaggaaggacaagacctgagccgatactgctcagcacgagaacactgataaagaggacaagattttcaatgaatgacagtgccgcgtaagatacggtcatgaacgccaatccgagtacgatcagttttttcattaacgattgcttttgcccgattttgcttcctgttgtataagacgtaacacacataaccaaaagcggaatcgctaaaatcaagccttttttcacgccgtcggtgtcgtatgttttttcaagaacatctgataggtaaaacaggatgccgaataaagtaaacaaacaggtcgcaccggctaaataagcggtaaacagccatctgccttcatgtttaaaaacacttaacagccctttcgcatattttccgataggtggcggttctttttcctttttcttctctttaataaaaatccaagtcagcacgattgaaatgatacaaaacacagggaaggcaaaaaacgcgccataccagacaagcagggcgataagcgagccgatgatcggtgaaagcactttccccatgccgtttgaagcttcaacaaggcccagcaccttgctctcctgggcgcctttaaacagatctcccgtcagtgccatggcaatggggcctgttccggctgccccgattccctgaagcgctcgtcctgccatgacccaaggaaaggcattgtcaaaaaaacctgccgcaaacccggctaacaaaccgccggcaccatacaaaattaagcagggaataatgatgattttccttgagaatcggtctgcgagataaccgacaatcggaatcgcaaatgctgcaatcaaggaaaatactgtgatcacgagactgacttgaaattgtgataaatgaagttcagatttcatttttggcaaaatcggaataagcatcgagtttcctagggttaatattaaagggattgaaccgattgctacaatcgtcattccgttattttgttttgatgattccatctcagagcacactccttttcttctgcttagaatgtccctgatggcttcgtttattcagcgatcagacagcaaaaaaccgaacagaagatacctgttcgggaaaaaagagggttaaccgagagcctgtgaaatcaaagcatataagtgtccattttgaataggcgcttttttctgatagaacaaaatcggaggttcatcatctttatgaaatcccatttctatcaggctgtcatgcagagacgtgtgttcactcggtatatcgattcgcatcggcccttgtttgccggccgccagccttgtaattatctgtgctgcaacatctgatgatggagcgatgatagggccgaatttcaaattggccggtgtctgtacagaaagtccgtagccaatgagctgtccgtcctgatttctggcgatgatacattcgcatgaagcagaaataagctgctgcaaaaggtttgatcgatctccgccaaaggcagccagatccgccgcggttaagtcgtgaaagtcttgttctctaaaggatgtcagttcagcatcaagcttttttgtataaggttgaaaactgtgacagctgtactttcgcactgaacctgccgtatgaaaacctgctttttcataaagcggcaaaccttcttttgtggcgcaaagcctgatggcggtgttttcatccgtttgggtaatacaggcgtttaccatacgccggccaagaccgagccgttgatattctttgtcaacgatcacgaggccgatagaagcaagccggccaaacaaaaacaagccgatgcaggaaataatatcaccgctgacattttgatagccgaaaaagcgtccttgctggacaagcagtgccagctcttgttcgccgtaatccggccacccggcttgcctgcaaagccgcaatagactagggatatgttcttcatgaagcttaatcagctcatcgattaccctcatacagatcacctgcttgtttcgagttttttatacatgatgatatgtgtgcctatgccgggaatctcaaacggttcgccgagttcttcccagccaagctttgaatagtagcctttcacatggcttctggcattgcaccagactgcctgaacgccgttctttgccagtttctcttccgcgtgtttgatcagcgtgctcccgcctttttgatcacgatatccttcaagcgttgccatgcctctcagccgatatgctggggattctgttattaatggctgattttgcggggaaaaagaagcgatgctgatcagctttccttcaaaaaacgcgccgagatgaaaggagccttttgcatgatcctcttcatatttgcattgttcaatggattgatggggacgcagaatgcggtgccgaatttcatatgtatcttccgcggaaatggttttgacttcgagcataatgttcctcctcatgactgtttttctatatcgtaacacgaatcccgttgaaaaagaccgcccgattggatcagacagtcttttaagggattaatgcaaaaagatattttggcgctgctcatctttttgctgaatatatgaagtgagctcagcggttaagtcagatctgaggaaaggcgttatcaagtagatgccgttaaacagctcgcatgccgtatccagcagggagcgtgcaattgcaaggccttccgccttttgcttttctttatcttcaccggcatgggccattttttcgcgaatcgtatcagacagcttaatgccgggaatttcattatggatgaattcggcattccggctgcttgtcagcggcatgatgccgatatagatcggcgtcttcagatgttttgtttcgttatggatatcgacaagctgctgctcggaatagacaggctgagaaacaaaataatctgcaccgcaatctatttttttctcaagccgttttaccgctttatccagatggcggacgttaggattaaatgcggcggcaactgagaaattcgttttcttgccgagcggttttccagacagagacagaccttcattgaattgtttgatcagcctgattaaatcaaaagatgttaaatcatatacagacgtcgcaccaggaaaatccccgattttagaagggtcacctgtaatagcaagcacgtcattcagccctaacgtatcaaggcccattaaatgtgactgtaagccgataatgttacggtcacggcacgtaatatggacaagggaacgcatatcgagctgctgcttgacaagggcaccgcaggcaacattgctgatccgcggggtcgccaaagaattgtcggcgagtgtcagggcatcgattcccgcttcttttaattcagcagcagcggacagaaatttgtcaaagctcagttttttcggcgggtccagttctacgataatagagcgttttttcgctgcgatctcatccaggccgggctcggttcgctcgtgatgaacagaaatgaattctttggcccgggttttgacttctttttccgtaatcggagccagtccgccaactgcttccgccatcgccctgatgtgattcggcgttgtgccgcagcagccgccgataatccgcgcaccttgcttacggaattctgacgcgctgttttgaaaatacgtgccgtctgtttcatagacgagccgtccctcttcaagcgaaggaagactgctgttcggataaacggataagaatacgtcatcaaaaattggcacttcgctaagcgcttcaatcatgtgataaggcccgagccggcagttaatgccgacgatatcagccccgagatccgcaatcgatcgcaatgcttcagaaagaggtgttccgtcctgcaatacgccttgctcgtgcatggagacattgagcattatcggaagatcagtctctttgcgcgcgattttcagcacttcacgggcttcttccaaatcataatatgtttctaacagcaagccatccggctcttcatgcagcagcagatacagctgctcgcggaagctgcgcttaatttcgtcaagactgtacgcgtttttattaaatgtgcgtatgccgcccatcgttccaagcacgtatgcatcgcctgctgaagcccgcgcgatctttacggcctcctgattcatttttttgatgtcatcctcaagcccgtgtctggataatttaatatagttggccccgtacgtattcgtttgaataatgttggctcccgcttcaacgtacgctttatgtatgcgctgaatttcctccggctttgaaatattgagctcctcaaaacacctgtcaatgccataggagtagaggagcgtccccatggcgccgtcaccgattaacacctgtctttgcaaatcttctaaaagtcccattgtctgcctcctttattcacatcagcaaggaaaaaagagaaataaaaaaagtcctcttaagaagaagactttgtcagtgattttgtctcttcttatcttccaagctgttcgagcttgctggatttagcaccttggtcatggctgatcgccattacaccggttgctgaagcttcgtcgggccagtccctctgcttctcttgataagaacggatatgaaattttcgtgtcaggaagtgccaaaagatatctggcgtttttccctttctccaaatttaccgaaaataaagacaataatcaataggaatcagaaaatttatctgaaatttataaattgaacgtcaattggcagatctgctccccgtacagctgagataatctgctgcaggtcatctttgttttttccggtgacacgcacttgatcatcctgcacctgagactttactttcagtccggagtttttgatgatcgtattgattttttttgcgttgtccttgtcaatgccttgaacaagctttgcacgctggcgcaccgttccgcctgacgcgttttcaaccttgccgtaatcaatgttttttgtcggtacgtttcgtttaatcaatttgctgaccagcacatctttcagctggcttaatttgaattcgtcatcggaaacgaggaccagctcctctttatctaaagaaatgtcgcttttgctgcctttaaagtcatatcgggtactgatttccttcagtgcgatttggattgcgttttgcacttcaggcaattccaccttggatacaatatcaaatgaactttcttttgccatatgaaaacctccataacatttaacttatgtgttgattatagtagaataaagagaaacttccaacagaacaaagaatcaatttgtgatgattggaaaaaatgttaacaaaatccgcagagaataagcggaacaggaaggacgatagcatgagaccagggcagcaattaaccttgagtatagatcaccaaaccgacttcggttactttttaaccgatggggaagatacgattctcttacataacagtgaaatgactgaggatatcgaggacagagacgaagtagaagtctttatatacgtagaccagcaggaaaggcttgcggccacgatgaaaattccgatcatcagcgcggatgaatatggctgggttgaagtggtggataaagtggaagatatgggcgttttcgttgatgtcggtttatcgaaggacgcactagtcgcaactgagcatttgccgccgtacgaagatgtctggccgcaaaaaggggacaaactttactgtatgctgaaggtgacgaaccgggggcgcatgtttgcgaaaccagcgccggaagatatcatcagcgaactgtttaccgacgcttcagaagatctgatgaataaagagctgacaggtacggtgtacaggctgatcgcatcgggttcattcgtgatcacggatgacggtatccgctgttttattcacccgtcagaaagaaaagaggagccaagactgggttcaagagtcacaggccgggtgattcaagtgaaagaagacggttcagtcaacttgtcgctgcttccgagaaaacaggatgcaatgtcagttgatgctgagtgcattctaacgtatatgagaatgagaaacggtgccatgccgtacagtgacaaaagccagcctgacgatatcagagaacgttttaatatgagcaaagccgcctttaaacgcgcgctgggccatttgatgaaaaacggaaaagtgtatcaggaaaatggatggacatacgagaaaaaatagcatgaaaacggctcgcctgcagcagactgcggagcgagccgtttttttatgtctagtttaattcatcaaccagcgttctgattgccatttcgcgatccacattgtctgaaatcgcaatcggcgtaatatcaatggcgagaatgatcagaatcagggcacctgctgcagcaacataagaaacataatagaaatagttagcggtatcaacagtgttgacaagctcggcctgaactctggatgtatcatccttagaagcggcgatttcctttgcagcttctactttttcttcaacgatttgacctgcttttttcagcagttcatccactttcaatgcatctttgctgtaaacagctttcttcaggttatcaaaaaagtcagcatcctcttttttaatatcagcgacaacctgattggcaaaagcctttgcctgttttgtgttgagtttgtctgtcatcgctttattaaagacctctggaagctgtttgccaacttccccttgggcaaacacaaagcctttaaaaatttcctcacctgaatactcaagctgctttgcctgtgccacactttcttgctgcttcaccaaaaacacagtcgtcaccaatacaaccgacaaaaatactagaaacgccttcttcaaactgaaacctctcccttcttgtgttttttattccacaacagtctgcgaatatatgtaaattgaatcgtggaatcgataggagtgagatacaatatcaaaatgccggccatgataatcgaaaaactgatgaggcccagcatgactgcaaaaatctcatgcataaaaacagcgatgatcaaaatcaatctccaatgcttcttcggcgcaaacagtgccgcgaagatgacaatttgaaccagcagcgtcccccatgtcggaatcaccacgaacggacttgttacaattggcttcgttaacgcctgaaaaaagccgttgaagccaatggttttttcctgggcgaaataatagacggccgttccgtccacccattcctgctgagatagcttagcgacggtagagtgaaaataaagcaccgccacttggattctgatcacaaaataagaaataaaagctgttatttttccaagtgttcttttgccctctataggtctcgtactccaatgccattttctcggatcggtcagcgtgatgggaagcaataaaaaggtcatgactgctgctgcctgctcgcctccgtcgatgacgatcagcgatgactgcaggctgtaactgacataccaatgcagaaccccggtgattctggggcgccagccaatgacaacaagcaccagaatggcaatgcagacccatctgaaaagatttaacatcatatagttattttcgccgagacaaaagagactgagattcattttacaagctggatagctgctgatcccgctggctggcttcataatgaggctcgggtgattgatgagcagcgtcagcaggctggatagcgcaatgatgcttcgcgcgaggccatatacatttgtccacgggtttctttcgtcccatctggtgatggtctgttttatgttttcgagcatgagatcacaaccttgactatgctttttacctgataagacgaaggggtatatttagaatagctccaaggaacaatatcctctttcgtcaaatagtagctgccacaaagcagcgggcggggagcgggtgtttttaattgcacggttttggctttgcttttgcatgcgccgaggtccttttctttacatgctgtccactgttccttgccgacttggctgtagatcacgcccatttcaacgccttgtgaccgcccataccgatacaggccgaataggttgtcagccctcatattgggccatctgaccttggcgctggcattttcagcctcatataagccgattgcagtatcacgcggatttttgctaaaaaagccccagccctgagggaggatgctggacatgagaaatttggagtcctttgtcagcggaatcggggttgtccctaagctgccaataatagaaaacagaaatagcgaaccccaaaggattgaaaaaatgacaaaaaatgatatcgatttctgcattcgactgctccttttaacctgaagaatcgtttttacacttttcataatataaaaacatttatgtaataaaaaggttaaaaagtatgagaaattccatttttgttaaaaggaaaaacaggacattttacactgctatatgtgattgatatatagtgtttttttcgatatatttaaaccatgaaaacgaatcaagttaatgaccgctggattgttcaatttcgaaaagggattttcgagctggccatcctatccctactgcattctaaaccgatgtacggttatgagctgacgtcatccttaaaaaccacctcggctctggctatttcagagggagcgatttatccgattctgaaacgtatgaccgagaagggatggatcgaatttttttgggaagattcactggacggcccgaaaagaaagtattacaaaatgacacaaaaaggagaagaaatgttaaaagaacggctggagaaatacctggaaacccatcaagccttactgtctttatcgggggatttgctatgaatggacagcttatcattgaccgatacatggaggaactaaatgcagagctggagaatatgcctgatgtagagagagaaaacgctatcgacgaattaaaggggcatatcaccgctttcgttcaagacagaatcaaagccggccttagtgaagaggaactgcaggaagctgttgaatctgaattttctcatccgaaggagcttgccgaattgatgatgggtgatgggggagagacgaaaaggaggaggtctttattgggcaaaagctggctttcggtccttctcattgtcacgattatcgccctgccgctgctgccgtccgacttcagacatctgccgctggctgtttatttaatggtgctcgccggatatgtatggaagcggaaaaaattgatgatgtttgcaggtgtcagaaaaaacaaaatgcgctctcaaaaggagattgttacgatttcgcgagtcggtgcggtttatctgctgtttttagcagtggtgcttcttttgagcccgttcctcaatgcgcttgtcgtcctgctgctgattgcagtaagctgcgccgctttttttctttttcttaacatcaagtaatcttgtaggaggctgtaagatggaaatcagcatcaattatctattaattgtcatcgcgcttttattctttgtggttgcctattttgtcggaatcaaaaaacaaacctggatgctggctgggtttaacgaggcgcgtatacgggataaagaccggctggccagaatagcaggctactttttcttgaattccggtttgttcattttgctgaatagttttatctcatttcaaggtcaggagcagctcatacctccgcttatactggcatatggagcaggggttattatttatgtcaataaaaaattagtagagtagaaaaagaagggcagagcgaaatatctctgcccttcttttttgggaaaataagaacgaagcaccacatacaagtttttgtatttttgataggatgaagaaaaatggtagattccaaaataggaaggatgtggtgttttgcgcaacctgaccaagacatctctattactggccggcttatgcacggcggcccaaatggtttttgtaacacatgcctcagctgatcaaagcatcaaatacgaccatacgtatcaaaccccttcatacatcatcgaaaagtcaccgcagaagccggtacaaaacacaacccagaaagaatcgctattttcctatcttgacaagcatcaaacgcagtttaagctcaaagggaatgcgaacagccattttcgtgtttcgaaaaccataaaggatccaaagacaaaacaaacgttttttaaattaacggaggtttacaaaggaattccgatttacggctttgaacaagcggtcgcgatgaaggaaaacaaacaagtgaaaagtttctttggaaaggtgcatccgcaaatcaaggacgtctccatcacaccgtctatttctgagaaaaaagcaatacatgcagcaaggcgtgagctcgaggcttccattggaaaaatcgaatatcttgatggggaaccaaaaggcgaattatatatctatccacacgacggtgaatatgatctcgcctaccttgtgagactctcgacatctgaacctgagcctggctattggcattatttcatcgatgccaaaaacggaaaggtcattgagtcctttaatgccattcatgaaacggcaggtacaggaatcggcgtatcaggtgatgaaaaaagctttgacgtcagagaacaaaatgggcgcttttatttggctgacgaaacaaggggaaaagggatcaatacatttgacgcgaagaacctgaacgaaaccttgtttacgcttttgtctcaactgatcgggtatacgggcaaagaaatagtcagcagcacgtccgtatttaatgaacctgcggctgtagacgcacacgcaaatgcgcaagccgtttacgattattacagcaagacatttggccgtgattcttttgatcaaaacggagcaaggattacgtctaccgtgcatgtcggcaaacaatggaacaatgctgcgtggaacggtgtccagatggtatacggggatggagacggttcgaaatttaagccgctgtctggatcgctcgacattgtcgcgcatgaaatcacacacgcagtcacacagtattccgccggtcttttatatcaaggagaacccggtgcattaaatgagtccatttctgacattatgggcgcgatggctgaccgtgatgattgggagatcggcgaagatgtctatactcctggtattgcaggagattcattgcggtcattggaggacccatctaagcagggaaatccagatcattactcgaaccgctacacaggaacagaggattatggcggagtccatatcaattcgtccattcacaataaagcagcttatcttcttgcagaaggaggcgtgcaccacggtgtacaggttgaagggattgggcgtgaagcaagtgaacaaatttactatcgggctttaacatattatgtaacggcatctacagatttcagcatgatgaagcaagcggcgattgaagctgccaatgatttatacggtgaaggctcgaagcaatcagcttcagtcgaaaaggcgtatgaggctgtcggcattctatgagcaaacaaaaacagtcaggacacagagtctgactgtttttgtttgctcattttcttaaaaagaatatcgccaatgtacctggaccggcatgcgagccgattgctgaactgattggatgcataatgatttctttcggcttgaacgcttcctcaatcaggtgtttcatgtccgtggctttttctttgttcgcggcgtagctgatcccgacggtttgatcgctccaatcatccccgcgctctttcataagctcgatgatccgtttgaaaagtttcttctgtccgcggattttttccagaggcacaagcttgccgtcctccatctgaagcagcggtttaatattcaacaggccgccgacaaaagcggacgttttggatatccggccgcccctcgcgagatatgttaaatcatcaacggtaaaaatgtgttcaagctggctgcaaaagttctttacagacgtttcaatttcttgtattgtattcccgttgatacagagatcggcagcatgccggacagccagaccgtatcctaatgaagcgcatttggaatcaatgacccgcaaatcgaaatcggggaattcctccttcacttcattggcgatcattacagctgtctgatacgtgccggagagacctgaggaaaaggcaatgtaaagagcgggatcacctgtttcggcatattgcaaaaacacatttttaatcgtttgcggtgaggcttgggacgtcttaggcgtttctccattttgcatcgcttcaaatatttgatccgcatgaattgtgactgcatcttcgaattctttatcgccgagagaaaccctgagcggaataaagccaatgcctttttcttcaaaataagaacgaggcaaatcagtggcgctgtcagcgatgagatgaactgtcatattgcttcccttctttccgttatcgctcgttatcatgagagttaagccaactatatcatattaatttgccaaaatcgtgttcaaatatttgttttaagggaaaacataataaagaagaaagagcggaggaacatgccatggtactagatcaaacaaaaaaattactcatcgtcatcatcggcgctttactcaatgctgccgggctgaacttatttttgattccagcagatgtatatgccagcggatttacaggtgttgcccagcttttatcaagcgtcgttgatcaatatgcccccttttacatatcgacgggaacgctcttgttcctcttaaacattccggtcggtattttaggatggctgaaggtcggcaaatcgtttacagtgtacagcattttaagtgtcgcactcactactctgtttatggggatcctgccggaaacaagcctgtcacatgacattttgctgaacgcggtgttcggcggcgtcatttccgcagtcggtatcggcttaacattaaaatacggagcttcgacaggcgggcttgatatcgtcgccatggtgcttgcaaagtggaaggataaacccgtcggcacgtatttcttcattctgaacgggattatcatcttgacggcaggattattgcaaggttgggagaaagcattatataccctggttacactatatgtgacaacgagggtgatcgacgccattcacacccgccacatgaagcttacggcaatgattgtgacgaaaaaagcggacgaaatcaaggaagccatttacggaaaaatggtgcgcggcatcacaactgttccggcaaaaggagcttttacgaacgaacagaaagaaatgatgattatcgtcatcacgaggtatgaactgtacgatttagaaaagatcgtcaaagaagttgatccgaaagcatttacgaacatcgttcaaacgacagggatttttggtttctttagaaaagactgacgaaagcaggtggaagtcgtgaaacggctgcttgtgatgctcctccccgtgctgcttttgataggctgcgggaaagatgagcagacagaacccgataaggaggtatcaggcggaatggagaatcaagaggttgttttatctattgacgcaattcaggagcctgaacaaatcaagtttaacatgtcgctgaagaaccaaagcgaacgtgctattgagtttcaattcagcacagggcaaaaatttgaacttgtcgtgtatgattctgagcacaaagaaagataccgttattcgaaagacaaaatgtttacgcaggcttttcaaaacctgacgcttgaatctggagaaacatatgatttctctgatgtgtggaaggaagtcccggagcccggaacctatgaggtaaaggtgacatttaagggcagggcggaaaatctcaagcaggttcaggctgttcagcagtttgaagtcaaataagaggctatggcgagtcgccatagcctttttttattggagtttgtccagctgattttgaaattgatgcagctgttgacgttccgcatctgtcgaattggcatacgcagaagatacagcatttttggctctcagaatcgcttgctcctgatcgccttcctcaaagccgtttgtcaccatgaccgcctgttgaacaaatgattttgcctgctgaaacagttcatttctcatttaatattcaacctggctttcggccgagtctcgtgccgcggcatgctggtgagcttcttctaaagtagaccgatatggaaatcttgcggcgtgtagcccgatggagtctttaccctgctgaataaaccttctggatttgcttcgtttacccattttgagactgcccccttccatactttgacgagatgagtcgtcttcaatagtatggtggggcaaagtaaggtttatgagtgggaaaaattaatacggaccttctttaaagtgagaaatattctttcaaaaatcttgcaacgccgtcctcttcatttgtagccgttgttcggttggcaatctgcttgaccgcgtcaattccatttcccattgcaacgccgcagcctgcaaattcaagcatttccaaatcgttatcctcatccccgaaagcaatgatccgctccctcggcacgccgtaataatcgctgattttctgcaggccgaccgctttattcatgccgcttttgataatttcaatgacatgccacggtgcggcccatcttctatggtcgattacctcggcatgcacatccgataaatatgagcgtattgccggcacatcttcttcttttgcatgtatgagtacagacgtcacatcttcaccaagattttcccgcaagtctccgaccgttacatttgttgtgttcatgttaaaggcatctatcaggtgctcatcatggtaatgaaagtatacgtcgtcaatcacttcagcaagcacgttatgtacgttgtagctctcgctgatatccacgagctgtttgacaacatcaagcggcagtgacgtatgataccgtccccagctgtcgtcttgcggatgatggacaaatgctccgttaaaattgacaattggcgttgtcagctccatctgctggtagtacatggaacttgaacgatacggacggcctgttgagatgcagacataatgcccgtcatcttttaggcgctgtatcgtatgaagggtgttttcagatatggttttatcatcctttaataatgttccatctaaatctaatgcgattaaatagggttttgtctccatgaaaagctcctttaaccttagattttgcttgttttgccttacttacagtgtagctttttaccatctttattgtctacatgttacacttatgattatggttatcctaaggaggggcacattgtgatacaaattgagaatcaaaccgtttccggtattccgtttttacatattgtaaaggaagagaacaggcaccgcgctgttcctctcgtgatctttatacatggttttacaagcgcgaaggaacacaaccttcatattgcttatctgcttgcggagaagggttttagagccgttctgccggaggctttgcaccatggggaacggggagaagaaatggctgtcgaagagctggcggggcatttttgggatatcgtccttaacgagattgaagagatcggcgtacttaaaaaccattttgaaaaagagggcctgatagacggcggccgcatcggtctcgcaggcacgtcaatgggcggcatcacaacgcttggcgctttgaccgcatatgattggataaaagccggcgtcagcctgatgggaagcccgaattacgtggaactgtttcagcagcagattgaccatattcaatctcagggcattgaaatcgatgtgccggaagagaaggtacagcagctgatgaaacgtctcgaattgcgggatctcagccttcagccggagaaactgcaacagcgcccgcttttattttggcacggcgcaaaagataaagttgtgccttacgcgccgacccggaaattttatgacacgattaaatcccattacagcgagcagccggaacgcctgcaatttatcggagatgaaaacgctgaccataaagtcccgcgggcagctgtgttaaaaacgattgaatggtttgaaacgtacttataaagcacgaagttattaacaagagctgaatttacgttatactgtagaaaaaaggagtgagggaacgtggaagaagcattaaaagaaaacatcatgggcgccctggaacaggttgtcgatcctgagcttggcgttgatatcgtgaaccttggtttggtatacgatgttgacatggatgaagacggcttaacgcacgtgacgatgacactgacatcaatgggatgccctttagcgccgattatcgtggatgaggtgaaaaaagcattagcggaccttcctgaagtgaaagacacagaggttcacattgtatggaatccgccttggactagggataaaatgtccagatacgcaaaaattgcgcttggcattcaataaaacaaaagaggacagcctgacatgtgaggctgtccttttttacagctgaaaggagtgaaaggaaatgatgtacctgctggcagttttatgcccgccgcttgctgttttgttttcgggaaaaccgtttcaggccttgctgaatctcatattgacctgtatcttttggctgccgggcgcgattcacgcctgctttatcgtcgccgaccgccgtgccgaaaaacgggcaagaagataatttgggaaaatgaggatgcagtcatggtataatggtcataaaaacagcagggagagcactatgaaaaagaaattgcttgcattcgcgctttgtactggcgcgtatgcggccctgtttgcgtactctgtgcactcagagcaaaaaacagacacaagcgagatgacggatgtcagccgcctgatgcctgtaaaaataaagcagacagtgaaagggcaggaagaggaaacgctcattgacacagtcaaagaggcaaatcgaaaaaacataaaaatttcaatcgccggggcccagcactccatgggcggccatacatattatgaggacggcatcgttctcgacatgacgggctacaacaaaatcctgtcactcgatcaagagaagaaaaccatcagggtgcaaagcggtgcaacgtggaatgatatccagaaatacgtgaatccatacggactcgcggtaaaagtcatgcagtcacaaaacatttttacaatcggcggatctctcagcgcaaatgcacacggacgtgatattcgctacggctcgctgattgatacagtcaaatcattccggcttttaaaagctgacgggacgattatcactgtcactccaaaagatgatttgtttacggcggtcatcggagggtacggcctttttggcgtgattcttgatgtaacgcttgagctgacagatgatgagctgtatgtcatgaagacagaaaaaatgaattacagcacatactcagactatttttcaaagcatgtaaaaggaaatccagatgtccgaatgcatctggcgcgaatttcaacagcgaaaaaaggatttctgaaagacatgtatgtcacaaattacgtattggctgatcatcaggatcagctgccatcatacagcgatctcaaagaagatgagtatacgggagccacaaagtttgcactcggtttgtcaagacagtatgaatggggcaggaattggctgtgggacacacagcaatcctatttcctgagccaaaacggcacagagatttcacgcaataacgtcatgcggtccgaatcaaagtttcttgagtatgaaaacaatgacaacacagatgttttgcaagaatactttgtgcccgtgaaggagtatgggtcctatattgatgacctgagacaaacgctgtcggacgaagatctgaacctgctgaacattacgatccgctacgtgcagaaaaatgaaaaggccgacctttcctatgcgaaggacgatatgttttcgctcgtgctattaataaacgagggcttttcaaaagaagaccaggcagataccgcccgaatcatcaggcgcatgacagacgttgccatcaagcacggcggcagctattatctgccttatatgacctaccagacaaaagcgcaaatgagacaggcatatccgaaaagtgaagcgttttttcagaaaaaacgaacctatgacccgaatgagcgctttatgaattacttttatcagaggtataaataatggggaaaaacaaattaaaatggctgacattatcacaaagcagcgtgtttttcgcaagcagcttaatctttccgttttatattctgtttgtgaaaaatatcggctcaagctacacacagttcggtttttcctacggattgttcgggttgagcggagcgctcatttacccgctcctcggacggctgtctgaaaggtttgacagccgttattttctgcttctgaactcgtgggggatggctgttctgcttttatatgtcccgcatatcggaagcgtcgttcaagtgtatatcgtccaagtgctgttagggctctttggagcgatgcaaaagcatggagaaaaagtgctgatcgctaattttacagacagcggagagcgtggaaagaagattgggaattaccatttttggacggctgtcttttcagcagcagcaattatgcttgggggctttctcgctgactttttcacagtgcaaatgattttttatgcaagctctattctatattttttgagtggattgatgatgatgaaaacaggctgacgcggtcagcctgtttttttatgcggctgaaaagcggtgctgcatcaacgtttttgtgctggagttgtgctgatttttttgagcggaatttccattgaacagaaaatttataaatgaataaaaatattaaatatacgattgaattaatttttattcatgttataatgttaaataatttcacaaagaccaagagggtgaacttgttttgaaaataggaattgtaggtgctacaggatatggaggcaccgaacttgtcaggattctctcgcatcatcctcatgcagaggaatgcatactttattcatctagcggagaagggaatgtctatagcgagggttatcctcatcttaccggcttagcggatcagaagctgaagccgattgatatgaatacgatcaaacacgaaatagatatcatgtttctcgctgcgccgcccggagtctcaagtgaattgactccaaagctggcagatgtgggaattccggttattgatctgtcaggtgatctgaggatacaagaaccggctgaatatgaaaaatggtataaacggacagcggcaccgaaggcggtgatacaagaggcggtatacggtctggcagaactgaatcaactgcaaattcaacaggcgaaactcattgccaatccaggctgttttccaacagctgttttgcttggcctcgcgccattggctcaaaagaaactgctcgatgaatctttcgttatcgttgacgcgaagacgggtgtttccggagcgggaagaaaagcatccatgggaacccatttttctgagctgaacgacaattttaaaatttacaaagtcaatgaacatcagcacacgccggaaattgagcaggcgctgaatgaatggcagccaggcctcgggcccattacattttcggctcacttggttccgatgacaaggggcatcatggcgacgatgtataccagattaacctgtgatctatcagcagatgacctgcatgatttatattcggaattttaccaagattcatattttgtgagagtgaggccaaaaggtcagtacccgcaaacgaaagaagtgtacggcagcaatttttgtgatatcgccgtgaccctcgatgagagaacgaacagagtcacgatcgtctcggtaatcgataatttaatgaagggtgccgccggtcaggcagtgcaaaactttaatttgatgaatggctggaatgaagaaactggactcactatcacgccaatttatccatagaacgggagagaatcgaaccatgattcagttaagtgaagatcaaattgtaaaagtaacaggggatgtatcctcgccaaaagggtttcaggcaaagggtgtgcattgcgggctgcgctactcgaaaaaagacctcggcgtcattatcagcgagacaccggctgtgagcgcagcagtttatacccaaagccactttcaggctgctccgatcaaagtgacactagacagcttaaagcacggaccgacactgaaagccgtcatcgtcaacagtgccattgccaatgcctgcacgggagaacaaggcctaaaggacgcatacacaatgcgggagagttttgcttcacagcttggcattgagccggagcttgtcgctgtttcatcaacgggtgtcatcggcgagcatttagacatggaaaaaatccacgcggggatcgagctgctgaaagaaacacctgcgggatcaggcgattttgaggaagcgattttaacaactgatacggtgatcaagcagacgtgctatgaactggcaatcggcggcaaaacagtcacgatcggcggagcggccaaaggctctgggatgatacacccgaacatggccacgatgctgggatttgtgacaactgacgcggcaatcgaagaaaaagcgctgcaaaaggcgcttcgggaaatcactgacgtttcatttaaccaaatcacagttgacggagaaacatccacgaacgacatggtattagttatggcgaatggctgcgccgaaaacgagtgcctgacagaagaccatccagactggccggtctttaaaaaagcgctcttgctcacttgtgaggatctagctaaagagattgccagagacggagaaggcgcgacaaaactaattgaagcccaagtacagggagcgaaaaacaatcttgatgcaaacgtcattgccaaaaagattgtcggctcaaatcttgtaaaaacggcagtatacggaacagatgccaactgggggcggatcatcggagccatcggacactccgcagcacaggtgacggcagaagaagtagaggtttatcttggcggccaatgcctgtttaagaataacgaacctcagccattctctgaatctatcgccaaggaataccttgaaggagatgaaatcaccattgtcatcaagatggctgaaggggacggaaacgggagagcgtggggctgtgacctgacctatgactatatcaaaattaacgcgagctatcgcacgtaataaaggggagcgaaatgaagaaaacaatcgtttttaaatgcggtggaagtgtcatccgtgagctgtcggaggaattttttcaaaatctgaaagagctgatggcgtcaggctggaagctggcgatcgtacatggcgggggaccggaaatcacgaatatgctgaaacggttaaatatcaagacagagttttcgggcggacagaggaaaacaacgaagccggtgctggaagtggcggaaatggttttatccggttctgtcaataaatttttcgttgctgagcttgccaaacacggactgcgagccgcaggcatttctggtaaggatggaggtcttttggaggctgattatctagatccggaaacatacggagaagtgggagaaatcaaaaaagtcgatgcgtccatggtgaacgcgctgatggaaaatggcatcatccccgttattgcgccgctgtctatgacaagcgactgcaaaacgctgaatgtaaatgctgatctggctgcttcagcagtcgccggagcgcttgaagccgataagctgatgttcgtcacggatgtcgatggaatcatgaaggaaaagcaacgtctggacgtcctgacccctaaggagattcagatgctgatcaagcaggaagtgatcaccggagggatgatcccgaaggtcaattcagccttgtcagctttatcagatcaggtgtctgaagtcatgatcgtaaacggaaaaggttcattcttcgcagaacaaacctttcaggggacaaaaatcgtcaaagcaaaggaggctgtttcatgagcagcttgtttcaaacctacggccgttgggatattgacatcaaaaaagcaaagggaacgtacgttgaggatcaaaacggcaaaatgtaccttgatttcattcaggggattgcggtatcaaatctaggacactgccatgaagcggtgacagaggcagtcaaaaaacagcttgacagcgtatggcacgtatccaacctgtttcaaaacagtctccaagagcaagcggcgcagaagctggcagcgcatagtgcaggagatcttgtctttttctgcaacagcggcgcggaggcgaatgaaggtgcgataaagcttgcccgaaaagcaactggaaaaacaaaaatcatcacttttcttcagtcgttccatggccgcacgtatgcagggatggctgcgaccggacaggataaaatcaaaacaggcttcggcccgatgcttgaaggctttcactacctgccatacaatgatccttctgcttttaaagctcttggggaggaaggcgatattgccgcggtgatgcttgaaacagtgcagggagaaggaggagtcaatccggcgagtgctgaatttttatcagccgtacagtcgttttgcaaggaaaagcaagcccttctcatcattgatgaaatccagaccggcatcggacggacgggaaaaggcttcgcatatgagcacttcggactctcaccggatatcatcacagtcgccaaaggattgggaaacggctttccggtcggcgctgtcatcggaaaaaaacagcttggagaagcgtttacccctggttctcacggaacgactttcggaggaaacatgctggcgatggctgctgtgaatgccacattgcaaattgtattccagcctgactttttgcaagaggctgctgacaaaggggcgtttttaaaagaacagcttgaggcagagctaaagagcccttttgttaaacaaatccgaggtaaaggattaatgcttggaattgagtgtgatggcccggttgctgacattattgctgaattgcagacattaggcttgcttgtattgccggccggcccgaacgtgattcggctgctgccgccgctcaccgtgactaaggatgaaatagcagaagccgtcagcaagctgaaacaggcaatcgctcatcattccgctgtaaaccagtgatttttttttcgatgtaaaggcataaaaattcatttttataattaattattcatcaagaggtgggctgttagatggaaggttatttagtgttagaagatgggacatcgttcagcggcgagctggacggtcatgaaaactgtacgggagaagctgtttttttcacaggaatgacaggctaccaggaagtgctgacagatccatcatataagggacagattattgtatttacctacccgctgattggcaactacggcataaatgaaaaggattttgaaagcaagaaaccgcaagtaaaagccgcggttgtctatgaggcgtgtgatcacttttctcattatgaagcggtatacagcctcaaggagtatttacagaaatggaacattccgctgttaacccatgttgatacgagggctgtcgtgaagaaaattcgggcaaacgggacgatgggtgcaacagtcacagcctctaaagaaggagctgagattgcccttcaacccgagaatgtggcagagcaggcttcagcccaggaaatcagcacattcggcgacgggaataaacatatcgctctcattgattttggctataaaaagtcaatcgcatcatcacttgtcaaacggggctgcaaggtcaccgtggtgccatacaagcaaatggaggccgtatacaacatcaaacccgatggcattgtgctatcgaacggacctggagatccgaaagccattcagccatatttaggaaagatcaaaagcatcatcagccgctttccgactctcggcatttgtctcggacatcagctgatcgcgctcgcgtttggagggaatacttttaagctgccattcgggcacaggggagctaatcatccggtcatcgaccgtgagacgaaacgggtctttatgacaagccaaaaccacagctatgtggttgatgaacagtcgattaatgaagaagagctcacgatcaggtttcatcatgtcaatgatacgtcagttgaagggcttgcccataaaaaactgcctgtcatgagtgttcaattccacccggaagcccatcccggacctgcggaaagcgaatggatttttgatgattatctaaagaatgtgataccagcaaggagagaaatcgcgcatgcctaaagacaccagtatttcaagcatattagtaatcggctcaggcccgatcatcatcgggcaggcggcagaatttgattattcaggcactcaagggtgcatcgcgctgaaggaggagggctaccgggtcattctcgtcaacagcaatccggcgacaattatgactgatgaagccttcgctgatgaaatttattttgagcctctgacagcagaaagcctgacagccatcattaagaaagaacggcctgatgggcttcttgccaatttaggcggtcagaccgcgttgaatttagcggtggagcttgaagaaacgggtgttttaaaagagcacggcgtcaaactcctcggcacatccgttgaaacgatacaaaaaggagaagaccgggaaaaattccgttcgttaatgaatgaattaaaacagcccgtgccggagagtgaaattgttgataacgaggccgatgccctccattttgcggaatccatcggttttcctgttattatcagaccggcttacacattaggcggaaagggcggaggaatcgcccctgataaagaagcctttacagctatgattaaacaggcgctattagcaagcccgatcaatcaatgccttgtcgaaaaaagcattgccggctttaaagagattgaatatgaagtcatgcgtgacagcaataacacatgcattaccgtctgcaacatggaaaatatcgatccggtcggcgtgcatacaggtgactctatcgttgtggcgccttcacaaacattgacagatgaagactatcaaatgctgcggacggctagtctgaccatcatttcagcacttgatgtcgtaggcggctgcaatattcaattcgcgcttgatcctttcagcaagcaatattacgtgatcgaagtgaatccgcgtgtcagccggtcatcggctctcgcatctaaagcgaccggttatccgattgcgaagatggccgcgaaactggcagtcggatacacacttgacgagctgaaaaatccgctcacaggctcaacttacgcaagctttgaaccggcactggactatgtgatcgtcaaatttccgcgctggccgtttgataaattcaaaaacgcagaccgcaagcttggcacaaaaatgaaagccaccggtgaagtgatggcgattgaacggaatttagaagcagcaatacagaaggcagccgcgtcgcttgaattaaaaaatatcgggacacaccttccagagctcagcggcttgtcaattgatgcgctatgggagttggcagtcactccggatgaccgcagatttttcgttgtcatggagctgttgagccgcagcgtctcgattgatgacattcatgcgaaaacaaaaattgatccgtttttcctgtatacctttaacaacatcatcaaattggaaaaccgcctgatggaagagggcggcgatctctcttttgacttattgaaaaaagcaaaggaaaaggggttctcagacgcaacgattgcctcattgatcggcaaaacagaggaagaggtgcgcgcgcttcgcaaggagatgggcattacaccttccttcaaaattgtcgatacatgcgcggctgagtttgatgcgaaaacaaactatttttactccacatatttcggagagaccgatggagatatcagccgcaaagagaaaaaacgcgcgctgattatcggatcaggaccgattcggatcggccaaggcgttgaatttgattacagtgcggttcacggcgtgctgacactgcaagagcttgggttcgaaaccatcatgattaacaataacccagaaacggtcagcaccgattatgaaattgcggatcgcctgtattttgaaccgatgacaacggagcatattgtaaacgtggcggagcaggaaaatattgattttgcaattgtgcaattcggcggccaaactgcaatcaatgctgctgaagcgctcgaaaaagccggcattactcttcttggcacatcatttcaaacgctcgacgtgttagaggatcgggatcaattttatcagcttcttgacgagctgggattgaagcacgcaaaaggagaaattgcttatacaaaagaagaagccgcttcaaaagcgagtgagatcggctatccggtgttaatccgcccatcttacgttatcggcggaatgggcatgatcattgttgactcgcaagcccagctttctcagctgctgaatgatgaggacagcatgccatacccgattttgattgatcagtatgtgtctggaaaggaagtcgaaattgatatgatttccgacggcgaggatgtctttatcccgacatataccgagcatattgaacgggcaggtgtccattcaggggacagctttgccattcttcccggaccgtccatcacgagcgggctgcagcagggcatgaaagatgcggcacaaaaaattgcccgaaaactttcatttaaaggcatcatgaacattcaatttgtgatcgacaatggaaacatactcgttcttgaagtgaatccgagagcgagccgcacggtgcctgtcgtcagcaaagtaatgggcgttccgatgattccgctcgccacacgactgctggcgggagcgtccttaaaagatctaaatccggaagttcaaaatcatcatggagttgccgtgaagttccctgttttttcttctcatgcaatccaggatgtggatgtcaagcttgggccggaaatgaaatcaacgggagaaggcatgtgtgtcgcatatgattctaacagcgccttgaaaaaaatctatacaagagtctggagtcaaaaaggaagcatttatttgcaaaacgttccggaagaagtgaaggagttagcagaaaacgcaggttttacaattcatgaagggacatttgcctcatggatggaacaggaaggaaaatcgctccacatcaatctgagcggttctgaagaagcacgcaaagaacgtttggaagccatgacgcacggcatccccgtctttacagaagaagaaactgtgcgggcgtttttacaaagcggttcaggccatccgcagcctgtatctctcaaagacctctataaaaaggaagtggcatcatgcacacagtgacgcaaaccagtttatacggaaaagatttattaacgttaaaggaccttagtgaagaggatataaacgccttgctcgcagaagccggtgagctgaaacaaaacaaaattcagcctatattccatggcaaaaccttggcgatgatttttgaaaaatcatcaacgcggacccgtgtttcatttgaagcgggcatggcgcagctgggcgggaacgccctctttctaagccagaaagatctgcagctggggcgcggtgagactgtcgctgatacggcaaaagtgctgtcaggctatgtggatgccatcatgatccggacctttgaacatgaaaaggtggaggaacttgccaaagaagctgacattccggtgatcaatggacttaccgataaataccacccatgccaggcgctggcggatctcttgacgattaaggagataaaagggaagcttaaaggcgtaaaagtcgcatacatcggtgacggaaataacgtggcgcactccttgatgatcggctgcgcgaaaatgggctgtgatatctcgatcgcttcgccaaagggatatgaagtgttagatgaagcagctgaagcggcaaaaacatatgcacttcaatccggctcttctatcacgctgacagatgatccgattgaagctgtaaaagacgcggatgtgatttattctgatgtgtttacaagcatggggcaggaagcggaagagcaagaacgtcttgctgtctttgcgccttatcaggtgaatggggcgctagtcagccatgccaagcctgactatacatttttacattgtctccctgcgcatcgtgaggaagaagtgactgcggagattattgacgggccgaactctgcagtgttccagcaggcggaaaaccgtcttcatgtgcaaaaagcactgctgaaggccattttatataaaggggaatcatcaaaaaactgctgagccaaactcagcagtttttttgatggcaacatattcacagccgcttaggcgcatactacagcaaaaaggaaaaggaggaaaaacagtgggacagcagcaccaattccggcccggacagaaagcgcctaataacggtgtctacgtagaaatcggcgagacagggagcatggttaaaaaccctcaaaaggtccatctgtcagcaggggaaatgttccccgaaacatcaaaccacaaccggctgtggacctacaaaagaaagccgtgaccactaaaaaacccaaaacaataaatgttttgggtttttggctttttaatgctggcttgcatttttgttcataggcatgatttctgctaaaaccatgattaagacatacagtacaacagcaatgacagatgatgttttgaaattatacgtaacgctgttcatgcttgcaaccaagtagcatgccatatgtgataaaaggaacgtccaaataaaggcaataatatatcgcacgtttccacctcgtccttctcattctattctaaaagttatcataccatacaaaaagcgaagggggaatccaattttagcagaaagtgaggtgacaaaagagtctgattcgtcacactttaatggtaaaatataaaacgtcaatcagtataatagccaaaaatgtaaaaggctaggactttaccttattcgtttcttttctatttacataagatagcgtgagatgaagtgtgaaaggaggcgggcaagcgatgggaataacggaaagatactttcaactgggaacggagcataatgtcattcatctgccctatcgcccgaacggcttcggcatctttatcttgggggacagaacccactttgtcggacatgattcaagcttttggcagcagcattatggcagaaatcagcttctgagcatgttgatgaatgaaggatacactctttttaacagcaatctgttcggaaggcattggggggcggaaaaagcagtcacctatgccaaacagctgatacattctgtactgaagcaggaaatcctcaatccgaagattcatattttagcagaaggcatgggtgctctcgtggccgatgaactgcttcgtttttccccggatcatatccgctcagccgcaatgttgaatccttgtctcgatcttcaggcacattatgaatcggaaaaagaaaataaatttttctataaacaatttttgaaagaagtatcgaaaagctacggaatttctgaaaaagaagcggaagcgcttcgttataaaacaattcaaagctacccgagcggcgtaccggttcatatatggcagcgtatgaccggatctccatatccctacagtgtacatgcagaagttttcaaggaaaaacagcaaaagcaaggctcaccggtcgacatgacatttcatttatttgagcatccaagcagaatttatgcatcaatttgcaaattctttcacagtcatgaaaaagaattatagagaatataatgacaacagccttctcttttgcggaggctgttttgttttgggaaatgaaaaaccggaagggcggcagatgcaatggaatcaacgctgattgtaggtgcggacgaatttttcggcctttcattatgtgagcgaatgatggatgaaggcatacatgttgacgttgttctggcggaaacagaagataaaatgagacaaatgtacttagaagaaagactcatgtggcttgggagaaatgaactctttcgccagcttgaacacattggagaccaaaattatgatacaatttgtatccagttcggaagttttttgcctttagaccaatgtgattctccttatattttagtatatgaagaagaccgaaaagaatgggaaaaacgtgaaaaaacaggctcggaaaaaaccgtgatcctgccgaaaatgtatgggccatggaaagaagaaacagaggaagacggctattatacaaatgacgtcgctgacgagttgctgagattcctgttagaaccaagccgtcatagcaaagatcagctttttgaattgcaagtcacagaaaaaacctcaaaagaagaagcaaaaacaaaaattatcgagtggaaaagacaattttcatcaattttcgacaaatattaagaaaaaccttccatgtttcgagttttctagatacaataaacgtataaaaataaacatgttatagcttgtcaaaaggagttgaacatgacttgatcacaaggcttgtcatgatcttttctgtcctccttttattgagtggatgtggacaaactccgttcaaaggaaaaattgagaaggtcggcatgctctttcctgatacgattaatgacctcgtatggggcacaaaagggtataaaggattactgaatatacaatccaaatacaatgtggacgtctattataaagaaggcgttaaaacagaagaagatatcataaatgcgattgaggattttcataagaggggcgtcaatctgctctacggccatgggagtgaatatgccgaggtgtttaacttggtcggcgaagattatccagatatggaattcgtcatttccaatgcgaaagcgaaagctgataatgtaacaagtgtccattttagcggggaagcaatgggcttttttggaggaatgactgctgcccatatgtcgaaaacgaatcaggtcggtgtaattgcttcctttacgtggcagcctgaggttgacggttttatcaaaggggccaagtatgaaaatccggatatagaggtaaatacgaaatatacggatcattgggatgatgatacaacagcagtaaagctttatcagaaaatgaagaacgaaggcgcggatgttgtgtatcccgccggagacgggtataatgttcctgttattcagcaaatcaaaaaagacggtctttatgccattggctacgtcacagatcaatcggatctgggcgagaataccgtattaaccagcacggtgcaaaatgtggacaaggcctatgaaatcattgctgaacaatttaataaaggcacccttgagggcggcgatcattactacgacctgaatacgggagtcgttgagatgggaacattcagcccgctcgtcgacaaagactttcagcaaagaatcgccaagctgatcaaaacatacaacaaaacaggcgagctgccaaaaaacgagtaatggagtgacgtcacatgcagcacgaaaaatcacttgaattcttgcaaattgccatgaaatatctccctgaagcgaaagaacagcttgagaaatcaggcattgagctctcaatggaggccatccagccgtttatgaatctatttacaacggtaatggcggaagcttatgagcttggcaagtctgacgctaaatctgaaacagaataagaagaagccacttttttgaaagtggcttttcacatgattttctttttaatagcggagagcatgggcgcaagctcctttaaagcgggcttgatttgatcaagagagttcataattgaaccgatttggtccataatatgcatgtaattaatcgtctcttcgtcgtttgtctgagaaacctgagaaacttcctcttgttgttcctcctccttctcttctgttggttttgctgcatcgccgaacatcattcttgaaaacacatccaactgcatacgcctcctttccatataccatactctatgagtaagatgaactgatagtttagacgaatatattgccatgtgaaaaaaaataggatagaattagtacctgatactaataattgatcacaacctgattgatcttctaaatttaagatataaaggagtcttcccttatgaaagctggaatacttggtgttggacgttacattcctgagaaggttttaacaaatcatgatcttgaaaaaatggttgaaacttctgacgagtggattcgtacaagaacaggaatagaagaaagaagaatcgcagcagatgatgtgttttcatcacatatggctgttgcagcagcgaaaaatgcgctggaacaagctgaagtggctgctgaggatctggatatgatcttggttgcaactgttacacctgatcagtcatttcctacggtctcttgtatgattcaagaacagctcggcgcgaagaaagcgtgtgctatggatatcagcgcggcttgtgcgggcttcatgtacggggttgtaaccggtaaacaatttattgaatccggaacctacaagcatgttctagttgtcggtgtagagaagctctcaagcattaccgactgggaagaccgcaatacagccgttctgtttggagacggagcaggcgctgcggtagtcgggccagtcagtgatgacagaggaatcctttcatttgaactaggagccgacggcacaggcggtcagcacttgtatctgaatgaaaaacgacatacaatcatgaatggacgagaagttttcaaatttgcagtccgccaaatgggagaatcatgcgtaaatgtcattgaaaaagccggactttcaaaagaggatgtcgactttttgattccgcatcaggcgaacatccgtatcatggaagctgctcgcgagcgtttagagcttcctgtcgaaaagatgtctaaaactgttcataaatatggaaatacttctgccgcatccattccgatctctcttgtagaagaattggaagccggtaaaatcaaagacggcgatgtggtcgttatggtagggttcggcggaggactaacatggggcgccattgcaatccgctggggccgataaaaaaaggtgaggtgcacacaagatgactaaaaaaagagtagttgttacaggacttggagcattatctccacttggcaacgacgtcgatacaagttggaataacgcaatcaacggtgtgtccggaatcggtccgatcactcgtgttgacgctgaagaatatccggcaaaagttgccgctgaattaaaagaatttaatgttgaagattatatggataaaaaagaagccagaaaaatggaccgctttacacaatatgcggttgtggctgcaaaaatggcggttgaagatgcagagcttaacattaccgatgagatcgcgccgagagtcggtgtttgggtaggctccggtatcggaggacttgaaacactagagtctcaatttgaaatcttcttaacaaaaggcccaagacgggtaagcccgtttttcgtgccaatgatgattcctgacatggcgacaggccagatttctattgcattaggagcaaaaggggtgaattcttgtacggttacagcatgtgctacaggaacgaactccatcggtgacgcgtttaaggttattcagcgcggtgatgcagacgtgatggtcacaggcggaacagaagcgccgctgacaagaatgtcattcgccggctttagtgccaataaagcgctgtctactaatccagatccgaaaacagcgagccgcccgtttgataaaaaccgtgatggctttgtcatgggggaaggtgcagggattatcgttcttgaagaacttgagcatgccctggcccgcggcgctaaaatttacggagaaattgtcggctacggctcaaccggagacgcttatcatatcacagcgccggcccaagacggtgaaggcggagcgagagcgatgcaagaagccattaaagatgcaggcattgcacctgaagaaattgattacatcaatgctcacgggacaagcacgtattacaacgacaaatacgaaacaatggcgattaagaccgtttttggcgagcatgcgcataaacttgcggtaagctctacaaaatcgatgacaggccacctcttaggagcagccggcggtattgaagccattttctctatcctggccattaaagaaggcgtgattccgccgacaatcaatattcaaacacctgacgaagaatgtgatttggattatgtgcctgatgaagcccgcagacaggaacttaattatgttctcagcaactcattaggattcggcggacacaacgcaacattaatctttaaaaaatatcaatcataatcaagccaaaccggctgcccttaaagggtagccggttttttttgtgtgcataggattaaaagaggaggcgatcacatgagtgtagaacaaacatatagctggctcaggaaggccggttcaatagatgatttggcgcattacattatcccgcttttttcaggtgcggagaaaaagaactggaagggcattctggggcatcttcagcatcatgggatgtttaaaaacataaaagagggtattcagacggtttccaagctgaaggaaaaaggtttttacggacatatccaaaaggaagaacagtacctcaaaaacaaatggcaaggtcctgatgtaccaattgttacgctgccggttgatgaacgaaacaggagaatccgtttagaattcggatcaaaatcaggactcgcctttcaagacaaaatgttcctttttctttcgtcagatttagattttgggtcggtatctgcccttatgacgcatgagtatcatcacgtttgccggttaggtcatctgacaaaagaggaaaaggatgtcacattacttgatacaatcatcatggaagggctggcggaatatgctgtttatgagaggttcggccgaagtcaaacggctgaatggacgacttggtatacaccggaacagcttcaggctttatatgaaaaaaagattgcgccccatcgggatatcaaacgggataatcgattatttccccagctgttattcggcaaaggatatcagccaaaaatgcttggatacgcagttggattcaatattgtaaaaaaatatttaaccgccagcaaggcaagcaccgcagacgggctgtccattcctgctgagacctttttggatgcaatgctttaaaaggataaaataatggaatttcattaataatattacatttatcctaaaaaattcttgattttgcaaaatgattgtaataatatacaactataaaatttttcgataattcaatattatttattatttctgaataaagggattgctttctcttgaaaacgtttgacaacaagaggggggaaaggggagctagcatgagcacacttttagaagtgaataatttaaagacttattttttcaggaaaaaggagccgatccctgcggttgacggagtcgattttcacatcagcaaaggcgaaaccgtcgcgcttgtaggtgaatcgggctccggaaaaagcattacttctttatcaattatgggcctcgtccaaagctcaggcggaaaaatcatggacggctctattaaactcgaagacaaagacctcacctcattcactgaaaacgattattgcaaaatccgcggtaacgaagtatccatgatctttcaggaaccaatgacctcccttaatccggtgttaacaatcggagaacaaattaccgaagtgctgatttaccataaaaacatgaagaaaaaagaagcccgtcaacgagctgttgaactcttgcagatggtcggtttctcccgggcggagcaaattatgaaggagtacccgcatcggctgtccggcggtatgagacagagggtgatgattgccatcgcactgagctgtaatcctaaactgctcattgctgatgaaccaacgacagcgctggacgtgacaatacaagcccaggtgctggagctcatgaaagatctctgtcagaagttcaatacatcgattcttctcatcacacacgacttaggtgtcgtgtctgaagctgccgatagagtgattgtcatgtactgcggacaagtcgtagaaaacgccactgttgatgacttatttttagaaccgcttcatccgtatacagaaggcctgcttacgtcaattcctgttatagatggagagattgataaattaaatgcgattaaaggcagtgtgcctacaccggataatctgccgccggggtgccgttttgccccaaggtgcccgaaagctatggataagtgctggacaaatcagccttcgcttttgacacacaaaagcggaagaacggtgagatgctttttatatgaggaagagggtgccgaacaatcatgacagcagctaatcaagaaacaatcttagagcttcgtgacgtaaaaaaatactttccgatccggtcaggcctttttcaaagaaaagtcggtgatgtaaaagcggtggatggtgtttcattttcgttaaaaaaaggagaaacactcggaatcgttggagagtcgggctgcggaaaatcgactgccggcagaacgatgatcagactgtacaaaccgacagagggccaaattctttttaaagggcaggatatttccaatctgtcagaggagaagctgcggaagagtgtccgcaaaaatattcaaatggttttccaagatccatttgcttcgttaaacccgagaaagaccctgcgttccatcataaaggagccgtttaatacgcacaacatgtataccatgcgtgaacgaaacgaaaaagttgaagagctgcttgcaagagtagggcttcacccgtcgtttgccggccgttatccccatgagttttcaggcggccagcgtcagcggatcggcattgccagagcactcactttgaatccagagctgatcattgcagatgagccggtttccgcacttgatgtatccattcaggcccaagtgattaacttgatggaggaattacaggaagaatttaatcttacgtatctatttatctctcatgatctgagtgtcgtccgccatatcagcgacagagtcggagtaatgtatcttggcaaaatgatggaactgaccggcaagcatgagctttatgacaacccgcttcacccatatacccaagcgcttttatcctccgttccggttacaagaaaaagaggttctgtcaaacgtgaacgcattgtcctgaagggagaactgcctagtccggccaacccgccaaaaggctgcgtattccacacaagatgtcctgttgcaaaaccgatatgcaaggaacaaataccagaatttaaagaagctgctcccagccactttgtggcttgtcacctttatagctaatgttgcccgcacagctttgagagggggtatgcacactacataaacaacagcctagaagaacgaacatttcaagagggggaatatctaatgaaaagacggaaaaccgcactgatgatgctaagtgtattgatggttctggccatctttttatcagcctgctcgggatcaaaatcaagcaacagcagcgcgaaaaaatcagcaggcaaaccgcagcaaggcggggatttggttgttggttcaatcggagcgccaacacttttcaactcattatattcaacagatgaatcaagtacagatattgaacaaatgatttacagctttttaacgaaaaccgatgaaaacttaaatgtcaaaatgtcactggcggaaagtgtgaaagagctggatggcggattgaaatatgacgtaaaaatcaaaaaaggcgttaagttccatgacggagaagagcttactgccgatgatgtcgtctttacgtacagcattccgcttaacaaggattacaaaggagagcgcggctctaactttgaaatgctgaaatcagtagagaaaaagggagattatgaggttttatttacgctgaaatacaaagaccctaacttctataacaatacgttagacagctacgggattctgcctgagcacattttaaaagatgtaccggttgcagagcttgaagataacgaatttaatagaaaaaatccaatcggctcggggcctttcaaatttaaagaatggaaagacggacaatacgtgaagcttgttgctaatgatgactactatgacggccgtccgtatttagacagtgtcacgtataaaatcattcctgacgccaatgcagcagttgcccagcttcaggccggagatattgatttctttaacgtgccgtcaactgactataagacagctgaatcgtttaataatgtcaaagtcgtaacagatttagcgttaagctatacgtatatcggttggaatgagaaaaatgagctgtttaaagacaaaaaagtgcgccaggcgcttacgacagctttagaccgtgaaacaatggtgcaaaccgtattagatggggacgggaaggtcgcttatatccctgaaagcccggtttcatggaactatccgaaagatatagaggttcctaaatttgaatacaacgtcaaaaaagctaagaagatgctgaaagaagccggctgggaagatactgacggtgacggcatcctcgataaagacggtaaaaaattcgagtttacactgaaaacgaatcaaggaaataaagttcgtgaagacattgcagttgttgttcaagaacaattgaagaaagtcgggattaaggtaacgccgcaaatcgttgagtggagtgcattagtagaacagacaaatccacctaattgggactatgacgcaatggttttaggatggagtttatcaacgttcccagaccattacgatatcttccattctagccagtctgaaaaaggcttaaataacatgtggtacaaaaaccctgaagttgataagcttctcaaagatgcaaaatcaatcagtgaccgtaacgaatactcaaaagcttacgaaaagatttaccaaaaacttgctgaagatcagccgtataccttcctttactatccgaacaaccatatggcgatgccggctaacttagagggttatgtgtatcatccaaaacgcgagttgtaccaaattgaaaaatggtggcttgcccaataatttataattttcccttgcaggggagggagtgcgtttccttcccctttgaatttgaaaaagaacaacgaaggggacaagaatatggttacatatattattcgaagaacgttatcttcgattcctattcttttgggaattacaattttgtctttcattattatgaaagccgctccaggggacccgatgacacttatgatggatcctacgatcagccaggcagacagggctcagtttattgaaaagtacggtctcaatgaccctgagtatgttcaatatttaaaatggctgggcaatatggttcaaggcgatttcggcacatccatcatcagaaaagggacgcctgtttcagaactgattttagcacggctgcccaacacactcctcttgatgctggtgtcaacaattttggcgctgatcatttccatcccattcggggtaatttctgcaaaaaaaccttattcgaagctggactacggcattacatttacttcatttatcggtttggcaatcccgaatttttggttcggtttgattttaatcatggtgtttgccgtgaatctcggctggtttccaaccgggggagtcgccacccttaactcagatttcagtatagtagaccggattcatcatttgcttttacccgcttttgtgctggcgacagctgatatggcaggcttaacgagatatacaagatccaatatgcttgatgttttaaatcaagattatatccggactgctagatcaaaaggtttcaaagagaatcgagtattatttaagcacggcttgcggaatgcactattgcctgttattacgattttcggcttaatgattccttcctttattggcggagcggttgtcgtagagcagattttcacttggccgggattaggaaagctgtttgtcgattcagcattccagcgcgattatccggttatcatggcaatgactgtgatctcggcggttcttgtcgttgtcggaaacctcattgcagacatcctttacgcgattgttgatccgcggatcgaatattaaaaggagggaaacagagatgtcagagctgcaaacaactccctcgccggagatcaggctgaaagaaaatatttcgaaaaagccagaaacaatgacaaagattttctgggaaaaattctcgaaaaacaaactggccattttaggtgccgttattctttttatcattattatgtctgctgttttcgcccctttaattgcaccttatccccaagagcagcaaagcctgcttgataaatataaggcgccgggccttgaacatctgatgggaacggataaatttggacgtgatattttcagccggatcctatatggagcgcgtgtctctttattggttggatttgcgtccgtagtcggttcgattttgatcggaacggttttaggagcattagccggatatttcagaggaatagtggatgctgtcattatgcgtgtagttgacattgtgttatccattcctgatattttcttgttgatcacgctggtcaccatcttcaagccgggtgtggacaaactgattttaattttctgtctcacaggatggaccacaacagcacgattagtaaggggagaattcttgtcgctccgttcaagggaatatgttcttgctgctaaaacaattggaacaaaaacgcacaaaattattttttctcatatcctgcccaatgcgttagggccgattatcgtgtcagctacgctgaaagtagggtctgttattctagctgaatcggcgctaagctacttgggctttggaatccagccgccaatcgctagctgggggaacatgcttcaagacgcacagaatttcacagtaatgattcaagcatggtggtacccgttatttcccgggctatttattttaatgaccgttttatgcttcaactttgtcggtgatggcctgcgggatgcgcttgacccgaaaaatattaaataaaaatgaatatcatatctgttataaaatatcaccaaatcagaaaaaaagcaggtctccttttgtcagaaaatatacaaagagatctgctttttatgattcttacataaacccactgattccagatttcctcaatctctttggaataatttctctatcccttgcctatactgtggacaacagtttttataaaagtgaggggttagagatgttatttcttcatgatgtgtgggtcaattggtttgaaggggaagaaaatggctacaatgtatgccactttcacgaatggcgcaaggaagatacggttgagcttttggatcaggtgccgctgttaagggtgccgtcagtactgtttcattacatagaaaacgatttgtcagagcttccgaaaggtttgcttgaagacgtacatcagaaatcgtacattcggaaaaatcatgagcggacaaagcttgagtattgttttgtcgtaacagacggaatcggcattttagctgtcgacacgatcggctacacgatccctgtcagaaaaagccgtctgatcccaagacaggagcagctcgtttatgaaatggtaaaagatgtagagcctgaaacatatgaatttgagccaaagaagctggaatcctccaaggaatatcacatcttatcattagcaccagaacatgtcagaggactgacaagaaaagaacggcaaatcaagcagctgatgtttatggcgcttgaccaattaaaagggctgaaaaaccgggcggaaattggttactggtacacagagtggaatccgcatatgtatgaacaaatcaaaaggatgagctttgaagagatttgggacatgctgtataacgaaacaattgaaggctggtcggacaagcacctagctttttgcgaaaacctaataaaaggacagccttttttcgaaaagctttgggaaatggaaaacgaatcaaaggtcaactgaaaaaaaccgctctttgcaaagagcggttttttgattagcgtctttttcttccaagacccatggcattctccatttttttcagcattttgtttgctgtccggttcgcccgttccgcgccttcatcaagaatccggtctaattcttcagattctatcagctcataatagcggtcctggatcggttttaatgcgttcaccacgacttctgccaaatcacctttaaactcgccgtagccttttccttcgtactttgcttcaagctcttcaattgtcgtattgccgaggattgaataaattgtaagaaggttggaaacgcccggtttgttttccttatcaaatttgacaatgccttcagaatccgttacagcgcttttgattttcttttcaagctgcttcggctcatccagcagggtaatataagctttctggttcggatcagatttgctcatcttcttcagcggatcattcagagacatgatgcgtgcaccgacttttggaattttcacttccggaatcgtgaagatgtcgttgtattttttgttgaagcgttctgcgagattccgcgtcagctcaaggtgctgcttttgatcctcaccgacaggcacgagatccgttccgtacagcagaatatcagcggccattagcggcggatatgttaacaggccggagacgacagcttcattgcctttggatttgtccttaaattgagtcatccgctcaagctcgccgatatatgcgacacactgcatcatccatccggcctgcgcatgcgcggggacctctgactgaataaacaatgttgctttttctggatcaagtccgacagctaagtaaagcgctgcgagattgcggatattctttctaagctcaagccggtcttgaggaacagttatcgcatgctggtccacgatgcaaaaatagctgttataatcatgctgcagttcgacaaactgcttcattgcaccgatatagttgccgagcgtcactgagccgcttggctgaatgcctgaaaaaatcgtttgtttcatgaaaacatcaacctcatttcttaaaacataataaaaaaggctcattcttcccctgtaaaaaagggacgaatgaaccgtggtaccaccctgattattccattaaaatgaaatcactctgacgtttgtaacggagactgctccggctgagcctacttttttccagttcggtcagctgctccaaagtccattccacattgcccgttatctgctcccagcaccgcagactctcttcaaacaggtgaaatgtgtactactctttttcatagcaagcttttcttttgattgcttcattataaatcaattataaccaattgtcatcatgaaaaaacattcttttttccagtaaaattgtaataatataaataacacgagtgttgtaaaatccttaaatgataactgctatcagcgtaaaaacaggcagatattatatgtaaaaagcaatatgggcagaagacacatgaaaaagtttttaatcaatttatgctttaaatggtagaaggatattatgttcatggaagaaaaactaacgaagtttaaatattttaaattgataaaataatattgcaataaattatttgtttcattataatgaacttgttcactctattgttacagcttttttacaaaaataatcagaaaagacggaacagaataaaagtttgtgaaaactcaggttcatttgtctgatatttctgaggatttagccgtaaggagctgaaaattattattagggggtttgcgaatatgaaaaaacgttggtcgattgtcacgttgatgctcattttcactctcgtgctgagcgcgtgcggctttggcggcagcggatcaaacggtgaagggaaaaaggacagtaaaggaaagacgacacttaacattaatattaaaactgagccgttctccttacatccgggattggcaaatgattcagtttcaggcggtgtcatccgtcagacttttgaaggattgacacgcatcaatgcagatggggagcctgaagaaggcatggcatccaaaatcgaaacaagcaaggacggtaaaacatatacattcactattcgtgatggtgtgaaatggtctaatggagaccctgtaacagcacaagattttgaatatgcttggaaatgggcgcttgaccctaataatgaatcacaatacgcttaccagctctactacataaaaggtgctgaagcggcgaataccggaaaaggcagcctagacgatgtggcagtaaaagctgtgaatgacaaaacgctgaaggttgaattaaataacccgacgccatatttcactgaattaactgcgttctatacgtatatgccgatcaataagaaaattgcagagaaaaataaaaagtggaatacaaatgccggagatgattatgtatcaaacgggccgttcaaaatgacggcatggaaacacagcggttctattactctcgaaaaaaatgaccagtattgggataaagacaaagtcaaactgaagaaaatcgatatggttatgatcaacaataacaatacggaactaaaaaaattccaagctggcgaacttgattgggccggtttgccgctcgggcagcttccgacagaatctctcccttccttgaaaaaagacggttctttacatgttgagccgatggcaggtgtgtattggtacaaattcaacactgaagctaagccgttagacaacgtcaatatccgtaaagcattatcttatgcgattgaccgtcaatcgattgttaaaaacattacgcaaggtgaacaaatcccggctatggctgcggtgccgccgacaatgaagggatttgaggataacaaagaaggctactacaaagacaacgatgttaaaacggcaaaagaataccttgaaaaaggcctaaaagaaatgggcttaagcaaggcatctgaccttccgaaaatcaaattgtcttataacactgatgatgcacatgcgaaaatcgctcaagctgtacaagaaatgtggaagaaaaatttaggcgttgatgttgagcttgataactcagaatggaatgtctatattgataagctccacagccaagattatcaaatcggccgtatgggctggcttggggacttcaatgatcctatcaacttcctagaattgttccgtgacaaagacggaggaaataacgatacaggctgggaaaacccagaattcaaaaaattgctgaatcagtcacaaactgaaacagatcaaaacaaacgtgcagagctgctgaaaaaagcggaaggtattttcattgatgaaatgccggtagctccaatttatttttatacgattccttgggtacaagacgaaaatctgaaaggaactattattactggaactggagaaatttacttcagaaacgcgtactttcaataagtcttatttgtgaaaacaataacctcaaggtatatggggacctatttcccatatacctttcttactgaggaatataaaaaagtaaaaaccatggaggtgttcccccttgctaaaatatatcggaagacgcttagtctatatgattatcacactatttgtgattgtaactgtgacattcttcttaatgcaagcagcaccgggcgggccattttcaggtgagaaaaagcttccgcctgaaattgaagcaaacttaaatacgcactatggcttggacaagccgctgtttgtacaatatgtcagttatttgaaatcagttgcaatgtgggatttcggaccgtcatttaaatataaaggtcagagtgttaacgacctgatcagttcaggtttccccgtttcatttactcttggagcagaagctattctcctcgctttagcattaggtgtattgtttggagtcattgcagctctttaccataataagtggcaggattataccgtcgcgattttaacgatatttggtatttcggttccgagctttatcatggcggctgttctgcaatatgtgttctccatgaagcttgggctgtttccggtcgcggggtgggattcctgggcatacacctttttgccttcaatcgcacttgcttccatgccgatggcgtttattgccagactttcccgttcaagcatgatcgaagtgttaaacagtgattatatccgcacagcgaaagcgaaagggctgtcccgcccagcggttacagtgcggcacgccattcgaaacgcgcttttgccggttgttacatatatgggcccgatggccgcacaggtcttaacggggagcttcattattgaaaccatttttggtatccccgggcttggtgcacacttcgtcaacagtattacaaaccgtgattatacggtcattatgggtgtaacggtgttcttcagtgtcatcctgctattgtgtgtattaattgtagatgtgttatacggcattattgatccaagaatcaagctttccaaagcaaagaaaggagcctaggccatgcagaacattccaaaaaacatgtttgaaccagccgcagcgaatgccggcgatgcagaaaaaataagtaaaaagagcctttccctctggaaagatgcgatgcttcgcttccgcagcaataagcttgcaatggtcgggcttatcattatcgtacttattatccttatggcaatttttgcgccgatgttctcaaggtatgattattcaactactaatctcttaaatgcggataagccgccttcaaaagatcactggttcggaacagatgatcttggacgggacattttcgtccgtacatgggtaggggcgcgtatctcaatctttatcggtgttgcagctgctgttctcgatttgctgatcggcgttatttgggggagcatttcaggcttccgcggaggcagaacggacgaaatcatgatgcgtatcgctgatatcctttgggcagttccttcattattaatggttatcttactgatggttgttcttccgaaaggtctatttacgattattattgccatgacgattacaggctggattaatatggccagaatcgtgcgcggacaagtgctgcagctgaagaatcaggagtatgtgcttgcttcacagacactgggtgcaaaaacatcccgtcttctgtttaaacatatcgtgccaaacgcaatgggttctattttggtcacgatgacactgacagttcctactgcaattttcacagaagcctttttaagttatttgggacttggtgttccggctccgctggcgagctggggaacgatggcttctgacggattgcctgcattgacctattatccgtggcgtttattcttccctgccggatttatctgcattacaatgtttggtttcaacgttgtcggcgacggattaagagacgcattggatcctaagttacgtaaataagggagtgatacgggtgacacgcctattagaagtaaaagatttagcaatttcatttaaaacatatggcggagaggtccaggcgatccgcggagtgaatttccatctggataaaggggagacgctggccattgttggagaatcaggttccggaaaaagtgtaacctctcaagcgattatgaagctgattccaatgcctccgggttatttcaaacgcggtgagatcctgtttgaaggaaaggatctggtgccgctgtccgaaaaagaaatgcaaaatgtccgaggaaaagagatcggcatgatatttcaggatccgatgacctccttaaatccaacgatgaaggtcggtaaacaaattacggaagtgctttttaaacacgaaaagatctcgaaggaagcggctaaaaaacgcgcggttgaactgctggaattagtcggtatcccaatgccggaaaagcgggtgaaccaatttccgcatgaattttcaggcgggatgagacagagggttgtcattgccatggcgcttgcagcgaatccgaaacttctgatcgccgatgagccgacaactgctcttgatgtaacgattcaagcgcaaattttggaattaatgaaggatttgcaaaagaaaattgacacgtccatcatctttatcacacacgatcttggtgttgtggctaacgttgctgaccgggtcgctgtcatgtacgcgggacagattgtagaaaccggtacggtagacgaaatcttctacgatccgagacatccgtacacttgggggcttcttgcatccatgccgacactggaaagttcaggagaggaagagctgactgcaattccgggcacgccgcctgatttgacaaacccgccaaaaggagatgcttttgccctgcggagctcttacgcgatgaaaatcgattttgaacaggagccgccaatgtttaaggtatccgatactcattatgtaaaatcgtggctgcttcatcctgacgcgccaaaggtagagccgcctgaagcggtaaaagcgaaaatgcgtaaactggcaaatacgtatgaaaaacctgtcttagtgagagaaggtgaatgaattgactgaaaaattattagaaatcaaacatttaaaacagcactttgtcacaccaaggggaacggtcaaggctgtagatgatttatcatttgatatctataaaggtgaaacattagggctggttggtgaatcaggctgcggtaaatcgacaacaggccgaagcattatccggctgtacgaagcaaccgatggtgaggtgctgttcaacggcgaaaatgtgcacgggagaaaatcgcggaaaaagctgctggaattcaaccgcaaaatgcagatgattttccaagacccatatgcatccctgaatccgagaatgacagttgctgatattattgctgaaggccttgatattcataagctggcgaaaacgaaaaaagagcggatgcagagggtccatgaactattggaaacagttggtttaaacaaggaacacgcgaaccgttatccgcatgaattttccggcggccagcgccaaagaatcgggattgccagagctcttgctgttgatccggaattcattatcgcggatgagccgatttccgctttggatgtatccattcaagcgcaggtcgtgaatttaatgaaagaactgcaaaaagaaaaagggctcacatatctgtttattgcccacgatttatcgatggtcaaatacatcagtgaccgcattggcgtcatgtatttcgggaaactggttgagcttgcgccggcagatgagctttatgaaaatccgcttcacccatatacaaaatcattgctttctgctattcctcttcctgatccggactatgagagaaatcgcgttcgccagaaatatgatccgtctgtccatcaattaaaggatggggaaacgatggaattccgtgaagtcaaaccgggacattttgtgatgtgcacggaagccgaatttaaagctttttcatgattcatcaatccttcaagagatttctcttgaagggtttttttgcgtcctcatagaaagtgagaatgataacatttacaattagaggaaaaaagcggaggcgaaatacgattcaatttctgcataacaaaaatgtttttgcgctattgctgtctcaatcttttcaatctttagcaggtgtcctcgtcacaatcgttttaatggtccgggtctatcaaatgactgactccgtttttttggcgggccttattttatcgttcatgtcgtttgcgagtatagcagcaagcttttgcgtctctccggtgcttcgcattctcggttttaaaaaggtgcttgcgggagcgaatctgctgagagcggtctttacaatcctgatggcatacagcgtcactcatcacggacaggcattcttttggattacgctgctgtttgtgttttgtttttccttcgcgggcgctttttttcagccggcaagatttgcgctgctgccgattattgttccaaagaagcaatatgtaaaagcgaatggtgtgatctccctctcgaatcaattgttcttaacagcaggctggggccttggaggccttctgacgtacgccgttccttttgaactcgttgtcggcgctgccatttgcctgtttgttctatcgggagcttccatcagtgtgttgcatgtaaatgaagaagaggctgcaggaactgctgaaacagcatctgtcagaagtatatggaaggatttaatgatcatccctattgtaagagacattactgtaatggacatgttagaagctttggcgggttccgtatggtcatctgctattctcctcgcatttactgcggctgttttgcatgaaacagaggtgtggtgggggatgtttaacgcttcctattttataggcgcaattgtcggcagtgtgattgctattcgtttttcttctttttttgagcggaatatgggctatgccattatgttcagctcgcttgtaatgtcggcgctgacccttttgttttcattttctccagtcccatttttatgcgctctggcttgtgctgcaatggggcctttttatcaggtgcgtgatatttgccaggaaaccatgctgcaggaggttattcccgagcagaaacgaatcggaatcatggctgcaaaaaatgcgattttgactccttggtcaggcgtcacctactccattatggggctagtggctgatgctgctggtgcgaaaatagcttttatcgcggctgctgcattatatatcatgacatttctgattgcactggcgcagccccgcctgattcattacaggcgggaaaaccgagttcaatgagatacacttcaaaatgaacggagcagctggctccgtttttgctgaaaaaaaatgaaaccatggcggaagttcgcacgtctttatagatgtaaggctgtttaaacaagaagaaatggggtatatctaaaagtatgaagacaacgaactcataaggagcaaatcaatgaactggtatgaaaagcttagcgagtactttccaattgaagaaatgaaatcaaaagcgcatatggaagctcttctgaaagagcgaagcgatatttatcataaagatgaaggcaaacatcatattttaatgtttgcggagttcgattcttttatcttcgttgattatctgtatgtgtctaaggatgcaagagggcaggggcttggcggcaaattgatcgcgaagctgaaaaagaaaaataagcccatattgctcgaggtggaacctgtggatgaagatgatactgatacagaaaaacgcctgaggttttatcaaagagagcatttcaagcatgctcagtcaattgggtaccggcgccggtcattggctacgaatgaagtaaacaagatggagattctgtactggtcaccaaaaacagaatcagaagaagaaattcttgaagccatgaaacagacatatgaaaacattcatacttataaagacgagaaatggtacggagaatcgtacgaaaaaacggatgaagtcctgaaactcattgatgaagaaaaacaaaaaaatattttcgatcagttaagctaattgagaattagaacatatcatgaacattaaaaatttgctggattgacacatttttttcttaggatactgttcacacttacttttttatagtataatacctgtaaagattccttttttagagtaatttcaatttaagaataaaatagatgttcatcctactaattagaggagtgaagatgaatggttacactatacacatcaccaagctgtacttcatgcagaaaggcgagagcgtggctcgaggagcacgatattccatttgtagaaagaaacattttctctgaacctttatcaattgatgaaataaaacaaattcttcgaatgactgaggatggaacagatgaaatcatctcaacccgttcaaaagtattccaaaaactgaatgtgaacgttgaatctatgccgctgcaagatttgtaccgcttgatcaacgagcatccagggttgcttcgccgtccgatcatcattgacgaaaaacgtttgcaggtcggatataacgaagacgaaatcagacgtttcctgccaagaaaagttcgctctttccaattaagagaagcacagcgtttggcaaactaatagatcgtatcatcaaaagaaggctgagtcatcagccttcttttatttttcaacctgctggtaataaatgctcgcaagaatgacaaacgcaaccgtcaaaatggggaggagcgtttcaactgtgccgtgctgcgccataaaaagagacagctttttgtctctgacaatcatttctccgccagtataagcaagcagcccgcttcccgcgtaaatcagaagcggtattttctctagtgcaatatggatgagtttgctgccccaaataataaccggaaccgatacacacaaacctataacaacgagagaaaactcaccgtgtgatgctcccgcaactgcgatgacgttgtccagcgacataaagagatctgcaagcacaatcgttcgtatcgctctccacagggaggtgctgcttttaatgtgcttcgtgtcttttttttcaatcagcagctgatatcctaaatacagcaggaaaattccgccggcgcactgcaagaacggaatgttcaaaagatatacagctgcacttgttaatccgattctcatggcaacggcaataaatgttccgagaataatggcttgctgtctttgcttgtccggcaaatgtctgctggccatggcaataacaaccgcgttgtctccgccgaggatcaggtcaatcccaacaatgacaagcagagaaatcagatagtcatgctccatgaagcggcacctcgctttcagtccttcgcttgtactactactatatgagacaggttgtattttatgatatcagccgcctgaactgccgttttttaggaaaaggtgcatttttatttcttttgtgactgttttatcataaaatagaaatacaaaggaattcacactggccttggttaaggttaagatgtggacggaatgggtaaagtgtagtaaagtacaattaatcgggagcttagatgtcccttcaacatcttatatagaagggaaggttggcaaatggaaattgaaagaattaacgagcatacagtaaaattttatatgtcttacggagatattgaagatcgcggttttgacagagaagaaatttggtataaccgtgagcgcagtgaagaacttttctgggaagtcatggatgaagttcatgaagaagaggaattcgctgtggaaggcccactttggattcaagttcaggcactggacaaaggattagaaatcatcgtcacaaaagcccagctttccaaagacggacaaaagctcgaactgccgattcctgaggataaaaagcaagaaccagcatctgaggatcttgacgccttgctggatgatttccagaaagaagagcaagccgtcaatcaggaagagaaggagcaaaagcttcaatttgtcttgcgatttggcgattttgaggatgttatttctctatctaatttgaacgttaacggaagcaaaacgactttatattcgtttgagaaccgatattatttatatgtagatttttgcaatatgactgatgaagaggttgaaaatcagctaagcatcctgctggagtacgcaaatgaatcctcaatcagcatacaccgtcttgaagagtacggcaagctgattatttcagagcatgctctagaaacgataaaaaaacactttgcatcatagcaaaccgatttccttccggaaatcggttttttttatgcacgaaaatgccattttagagatgtgaaaaatcaaaaacatatagacaagcggaaaatacagcgaacaggagttgatcatcttttccagaaagtatacttcatctggaaaggagagatgacaattgtttagtgctgtgactgaagacggccaaatgtttcaccttctaggcgctcagcaaaaccagaaattaaagcggagacggttcttctgtccggtatgcgggggagagctagctgtgaagctcggacttcaaaaagcgccgcattttgcccataaacagaacaagtcctgctccatagatatcgaaccggaaagcgcctaccacttagaaggaaaaagacagttgtatgtatggctgaaaacgcaacgggcttcaccaatattggagccgtatataaagacaatcaaccaaagaccagacgtcatggcaaggatcaaggagcatatgcttgctgttgaatatcaatgcgccactatcgctccagatgtctttcaaaagcggacagagggcttcaaacaagaaggaatcatcccgcagtggattatgggatacagccgcttaaaacggactgcttcgtccttttatcagctttcagcttttcattggcagtttatcaatgcaagtccatacagagaactgatatgttattgtcctgaaaggcgttcttttctccgactcagccacatcattccattctacacaaaccattcttattcctcagtccaaacgatccctatccatcgggcaggtgcagacgatctttttttcactgaaccgaaaccctcaattcaatattcaggctggacgaaagcgattcaccgttttcgccataaaccccatcggtttaactctaaggaaacaaatcgccttaggcagatgttttatgagaagcggcagacatctttttcttttctgccgactgaagtgtttgttcctgttagaaaaggggcagtttttaagagtccggtttttgtgtggcaggggtttctttatttgtttatgacggatcttggagataaacgtgcgccaattcgtttttcagctgttttgcagcagtgcaaactgcacattcataaaaagaacattgcactcaggttcgaatgcagcgaagagtgtctttcagaagcggttaaacagtatattgattttttgtgcaagaagggatttttaagggagactcagaaagaagtatatgtgctgaatcggcctgcaggcggcatacattcaatgcaggatctcatagaaagagaccgcagctgttttatagaatgagtttgtctgatttggctcaccctaagacaaaggtggtgggcaggctgtgaaaggcacaaaaggaaaggtttttcgtgtttttactgcttttttggcattcgttctcttcattactgcatatgatttgacaaaaggcagtgaaaaaccggaagatattcacaacacaagtttattgagaaacagctgttttttcaattggcttgaatcaaagaagacgagggggatcaccatggctgaggaaaaaaaagcaaaccaactgcctgacagaagtgaggtaaaggcagaagacacatggagacttgaggatatttttcctagtgatgaggcctggaataaagaatttcaagctgtaaaagaattaattccgaatttatctaagtataaaggaaagctggcagattcagctgatcatttatacgaggctcttacgtatcaagataaagtgatggagcggctgggtaggctgtacacatatgcgcatatgcgctctgaccaggatactgggaactccttttaccaggggctgaatgacaaggcgggaaacctgtatacacaggccgcaagcgcgacagcttatttggttccggagattttatccatagaagaagacaaactgcagcagttcattcttgaaaaagaagaattgaagctgtactctcatgcgattgaggagattacaaaggaacgtccgcatgtgctgagcgagaaggaagaggcactgcttgctgaagcctccgaggtactggggtcatcttcaaatacattcagcgtgttaaataacgcagatataacgtttccgtccattaaagacgaagatgggaatgaaaaacagatcactcacggcaactttattaatttcttggaaagtgaaaaccgtgaagttcgcaaaaatgcgtttgacgcagtgtataaaacgtacggacaatataaaaacacaatggccacgacgctaagcggcactgtgaaaaaggacaacttctacgcgagagtgaaaaagtacaagtcagcgcgtgaggctgcgctttctaacaacagtattcctgaggaagtatacgataaccttgttaagacgattaataagcatttgccgctcctgcaccgctatattgcgctaagaaagaaagtgcttgagcttgatgaagtgcatatctatgacctgtatacaccgcttgtgaaagatgcggggatgaaggtgacatacgaggaagccaaagattacatgctgaaaggcctcgcacctttaggggaagaatatgcctctatcctaaaagaaggactggaaaaccgctgggtggacgtttacgaaaataaaggcaaacgcaatggggcttattcatcaggagcttacggcacgaatccgtatattttgatgaactggcataataacgtcaataatctctttacgctcgtgcacgagtttggacattccgtacacagctactatacgagaaagcaccagccttatccatatggcaattacagtatctttgtcgcggaagttgcctctacgacaaatgaagcgctccttggcgaatatttgctgaacaatttagaggatgaaaaacagcgcttatatattctcaaccatatgcttgagggcttcaggggaacggtcttcagacaaacgatgttcgctgaatttgaacatctgatccatacaaaggcgcaagaaggcgagccgcttacacctgagcttctgacaaatgtctattacgacctgaataaaaagtattttggagacggcatggtgattgataaggaaatcggccttgaatggtcgcgtattccgcacttctattacaattactatgtgtatcagtatgcgacagggtacagcgctgcccaagcattaagcagccagattttgaaggaaggaaagccggcggttgaccgttatattgacttcctgaaagcgggaagttcacaatacccgattgatgtcttgaaaaaagcgggtgttgatatgacgtctccagagccaatcgaagccgcgtgcaaaatgtttgaagaaaaacttgatgaaatggaagagctgctgatgaaagtcaagcagtcttaaaaagtaagcctgtgcggaaatgacgcacaggcttttttaaaaccctttaaaggttttccggtgattcaagcggtagagggtaaacaaaatagacagaaacagcagaggagaggtaatataaagcggcagcatatgcatcatgcctaagatattcagacagaaaaaaacggcaatgcacacaattgagatcaaagtagacatcatggcgatcctcctcgtcctttttccttataaggatatgagtgaatgcacttcgttatgttttgtgacaaaaatatgaacattaagcatagaggttgtcaaaagtcgacatcttttgttatcataaggatgtgaaattgatcacaaacaaacattacccctttgtttgaccgtgaaaaatttctcccatcccctttgttgtcgttaagacatatgaaaccgcgcttatcccggcgcggtttctttagtgctaaaaacagaacgtacgtttggttatggcgtaaaaaaacagcctcaagcatatgcacgcctgcggctatttttcacatgattgatattcatcagaataagtgctgagagacttccaaaacattccgtgtttggcttccactttggcaacctttttagcaaacgccagttttttcatttctttttctacctcttcaaggctcaggtcatatacaagagcaatttccttcgaggcaacgaagcggaaatattcaataaaacattctaaaggcggtgtttccgacggcttcggctcgtcgccaagcatctcaaataaaatttcttcatatacatcatatgagtagctgccaggaactttaagcccttcatcctcatgctgcgtattaaaaaacgtcagtgtcggattaacagaaacatccatctcagcagcaattttcatgtcacattgaagcgccttgaccgcgctttgagaatgcagatcttttttgaattcttcaagatcgagacttgtattttcagcaatctccaaaagcacgttttcatccgtaatatttttctttgaaacaaataggctctcctgcatatttctgagaaattgcatgccggcttttcgtccttgcaattcggctgctttaaaagcgagagcagccatataaggcgatgaaagcggctgatcctgttcgaaccagacattgccgtcacatgacatgccagagcggctcgcgatcttttcccatgcttctgcgagaagatgcttttttcgctttttatttaaagcggtaaggcttgcggaagcgataatgcgtaaggtgaaaaaacgtccgtatctgattttcagctttttgatgacgggctctaaggaccagcattcaggacataaagggtctacaaacatataaatttcaagcggtttttttggatgaccgtggcaatgggcgaagtatagctcatgctgatagtttgtcaagatgatcgatcctccgcttccgtttgattcaccatatgccttgctgtcaactccagccggccaaacaaaaactcacgaatttcgccctccagccctacatggtacattgcgtccttcatacagctgagccacgcatcagctctctcgtttgtaattggaaagggaagatgccttgctctgagcataggatggccgtgctcctcagtataaagcggaggcccgcctaaatactgagttaagaattgcttctgtttcctggcggtttctgtcaaatcgcttggaaaaatcggcttcagcaaaggatgagacgcgacacgctcataaaaagtatcaacaagttgcgatagaagttcctctccaatcgcttcataaggtgcgttaaacgattgtcccatgttgactactcctttaaatatggctaataggaatcataaatcctattgcaaaaagtaattttctgtatttcattgtttcatctagatttattttagcaacaaggcatcatttctacaaacaaactgccttttatgcgtttgatgacttatttcggctgacagccggggtttgtatttcatatcatatcacataaaaatcaggaatgcgtaagatttcacttcgcaaaaaaaccagagggaaagagcacctctggttacgcgtaataagctgaagttattttttttacatagttttgcgtttcttggaaaggaggaatgcctccgtatcggtcaacattccccggtccggcgttgtaagccgctaatgccatagacacattgccgtcgtatttatccagcatttgttttaaatatttcgttccgccctccacattttgctgcggatcaagcggattggaaacgccaagtgagcttgctgttgacggcatcagctgcatgaggcccatcgcacctactccgctgaccgcttttgcattaaagcctgattcctgtttgatgacggcgcggatcagtttttcatcaacgccatatttatcagcggcttttttaatcgcactgtcaatagaaaagtctcccgaactgatctgatttgctccatgtttgtttgaagctgaatctgcagcagctgtttcagtgctttctgccgcttttgtgattgaacctgaattgctgctcgtatatgagttaagcccatacgctgaaagcagtgacggcgctgttgtattcccgctgttcagcatgttgagcgggcttggcgatgaagaaggtgctgattgctgagatgccagaccgtttgtatattggctgagcaaagagctaaaacttgaaagcgggctttccgtattctgagtgtccgagctgctgcgtgcattagatatggactgtagtgcctgaagctgaagtaaagctgcccaattcgttacattcacgatgtcattccaccttatatagactttcgtttttcttcataaaaacgcagaattttatttttggtttcgcgctgaggaatgctgaattgctgaagcagcttctcgaaagcttttctgccctcatgccaatccgccgcctcaaattcaatttcatagtcctctttatttaaatatcggctgtggtctaaaactattaagcctttttctgtttctttttccgcacggtttgttgctaaagatccaaagtattgaatggcatccgtatcgatctgaagcttgtgcagctggtccttcacagggccctcgggaactgaaaatccagcgagatctgatacctctgaaagctgctggtgcgtttccagaagccccacatcagccggctcctttaatgtaaggacatactttccgttttttctgcggatacgaagcgcagcttgtttttgtttcagcgcgaagctgtctgtatcaaaataatgattcttttgatctgtaaaatctttttctgtcagctggagtgccgctgctatgtttttgaattcttgtttggtcagcatgtttttaaattcgatttcaatttcttggctcatgatgctcttcctttcctccctgtaaatcttatttttactattatctctttagatgttaggtttatcaatatcgagctcgatatgataaaatgaatctgtactttgtttaaaaaaggagagcattatgcaaaacagaatcgaaattttgaatgcaacattatcggatgatcagcttcgccttgcctgtcagacagaaggaaacgaagcggaacgcaagccgtcaggtcaaatgcttgttgattctgaccactttgcttttgtatacatacttgaattagctgattcttttgaatatgtcattataaaggaacatgtatggccggaactgaagcaggcccatgcacaaaaaataccggttgttttagaggcaggagaccaaacaattgaactggcaggcctgcatgaggagctggaatatcttttagaaaatataaaagataatgcaaactatggagaagaaatggaagaaaaagtgaaacgcgtgtttttatagaaactggttcggaattgggggatgtatgatggatgacaaacaatgggagcgttttttagtgccgtaccgccaggctgtcgaagagttgaaagtgaagctcaaggggatccgcacactatatgaatacgaggacgaccattcaccgatcgaatttgtgaccggacgcgtcaagcctgtggcgagcatacttgaaaaagcgagacggaaaagcataccgctgcatgaaattgaaaccatgcaggacattgctggccttagaatcatgtgccaatttgtcgatgacatccaaatcgtaaaagagatgctttttgccagaaaagatttcaccgttgtggatcagagggattatattgcggaacataaagagagcggataccgatcataccatcttgttgtgctgtaccctttgcagacggtatccggagaaaagcatgttctcgtagaaatacagatccgtacactggcgatgaatttttgggcgaccattgagcattcattgaattataaatacagcggaaacattcctgaaaaagtaaaactaaggcttcagcgcgcttctgaagcggcttcccggcttgatgaagagatgtcggagatcaggggtgaagtacaggaagctcaagctgccttttcaagaaagaaaaaaggaagcgagcaacaataggtaaaggggaagaagagcatgaaatttgccgtatcatcaaaaggagatcaagtttctgatacgctgaaaagcaaaatacaggcgtatttattggattttgatatggaactggatgaaaatgaaccggaaatcgttatttcagtcggaggcgacggaacgcttttgtatgcttttcacagatacagcgaccgcttggacaaaacagcatttgtcggcgttcacacaggtcatctgggtttttatgccgactgggttcctcatgaaattgaaaaacttgttcttgccatcgcgaaaacgccgtatcatacagtcgaatatccgcttctcgaagtcattgtgacctatcacgaaaacgagcgggaagaaagatacttagctttgaatgaatgtacgattaaaagcatcgaaggaagccttgttgctgatgtggaaatcaaagggcagctctttgaaaccttccgaggcgacggcctctgcctgtcaactccatcaggcagcacagcctacaataaggcgctgggcggagcgattatccatccgtctatcagggcgatccagcttgcggaaatggcttctattaataaccgcgtgttccgtacggtcgggtcacctctgcttctcccatcccatcatgattgcatgattaagccgagaaacgaagttgactttcaagtgacgattgaccatttaacccttctccataaggatgtaaagtcgatccgctgccaagttgcatccgaaaaagtgcggtttgcgagattccgtccgtttccattttggaaaagagtccaggattcgtttattggaaaaggtgaatagaaagaggacatatcgtggagcatttttttatcagaaagaacattacttccgctgaggacgggatgactgtaaaagaatatgccagtgaactgggaatttcgaaacgtctgctgaccgatattaagtttggcgggggagacctgcagattaacggtgagcatgtgacggtcaaatacgttttgaaagatggagatcttcttatcgtgaagtttcctgaggagcaggtgagcgagacgctgttggcagagcctgttccgctcgatatcctttatgaggatgaacatgtgcttgtgataaacaagcagccgtatgtgtcatcaatcccttcgagagagcacccctccggcagcattgccaatggaattattgatcattatcaaacaaccggagtgagggcgacagttcatcttgtcacccggttagaccgggatacatcaggtgtcatgcttgttgccaagcatcgatttgcccactccattttatcgtctgcgcaaaaaaacggccttgtgaaacgccggtatgcggcagtggttcacgggcggatggcacagatggagggaacagtcgatgctccgattggcagacatcctgacagtattattgaacggacggtaacgccagacggccagaaggctgttactcatttttacgtcacatgtgcaaatgacgacatgacctcggtggcattgcagcttgagactggacgaacccatcaaattcgtgttcatatgagttatctcgggcacccgttgtgcggcgatacactgtacggcggaacgagacaggaaattgaccggcaggctctgcacagcgagcatctttcgtttatccatccgctgacacaggagaacatgacgtttcatgctccactgcctcaggatatgagaaaactgataaaaggagagaatcattgattctctccttttttatatggggcgaaatcttgattcgtcgtaaggcagggagcttggaacagagacggtttctatttctggaaagcgaaagcctgtcagttgatttccgaacacgcagcctgtatcaatgttgatggtgcgattgaccttccgaggctctttcacaggtgtatgaccgtataccacccaagcctttccgttataggctgccgcccaatcacgtctgacgggtctgccgtccggatatgtttcacccgtcacgtcaccgtaaagcacaaagtccttcactctgcgggtatatttgccgatatcgtcagctcttatgccagcatgggcgacaactaattctccattatgtaagatgtcgtaaagcggcgctgtttcgtacagcttcataaactgttcgctgactgattttttctcatctttggaaagttcctcaagctctgccgctgttgtttcgagaccatgcatcacttttaccggatttccttttaagtaacgatataatttattgcaatggtttcccgggacataacgcacagcgcctttttcgtaagcgccggctacaaatcggatgacctctatcgatttgggccctctgtcagttaaatctccggcaaaaacaagcaccctgccttcttcatggacaggtactccatttttgattgtatagccaagcttttggattaatgcagtcatttcgtcatagcagccatgaatatcgctgatgatatcgtaagccatgcggtctcctccttaccgattgttttatttattatgaagcaaagtgttgtgagtcatcacaagcttttatgtgcaaattatagaagaagaatcattttctaaacaggattaagaccttatcactttatttttcatcatcacccttgttaaaatcgcgttatgttttttaaaaatgaggttttgttctctgagtgagaactagcataaccctgacttaaaaaggaggttctgattatggcgcatacatctgtcgcatctttagttgttgtacttatcgttgcatttttgacacccatccttttgcatcggtttaaactcagcatcccggttgttgttgctgaaatcattatggggctgataattgggaaaagcggccttaatttagttgtggagggtgacacctggctccagacactctctatgctcggatttatctttttaatgtttttaagcgggcttgaaattgatttttcgtcgtttgagaaaggaaagaaaaagcagttcctgccgaatggcaaggaagcgccgaatacgtttgctgcggcatctgttattttcgtcggtatttttattttatcattgctcttgtcctatgggttcgtcttggccggatttatccaaaatgcatttttgatgaccctgattatttcaacgatttcattaggcgttgtcgttccaacattaaaagaagaacggatcatgaattcgaatatcgggcagattattttgcttgttgctgttattgctgatttggccacgatgattcttcttgctgttttttcttctttatacggagaggacagcggaaacatgtggctcctgatgattctgtttgcggccggagtggtgctttactttttcggccgggtcttcaaacatcgctcttttgttcaatccatgtcaaaagggacgatccagatcgggacgcgtgccatttttacgttaatcattgtactcgttgccctgtctgaatcacttggggcggaaaatattctcggcgctttcttagcgggggttcttgtttccctgctttcgccaaacaaagaacttgttcagcagctggattcattcggttatgggttcttaataccgattttcttcgtgatggtcggtgtgaagcttgatatttggactcttttccaggataaaacaattttaatcatgattccgctcctgctgctggcgctgttagtcagcaaaatcattcctgtcatgtacttaaagaagtggtatgataaccgaaccattttcgcgtctggtttcctgctgacatcaacgctttcgctcgtgattgccgctgcaacaatcggccagcagcttcacgtgatcagtgcaaatatgtcaggagcgctaattttagtagccgtcattgcaagtatttttacgccgatctgttttaaaaaattatacaaacgggaagagcagccggaggagaaaaagacgattacgttcattggcgccaatcaaatgactttgcctgtcacactcgaattgccagaggaagagtatgacgtgcgtgttgtacacgtctaccaagagaatgcggaggaaaagctgtcagaatcagtgtttgctgttgaaacaatttctgactatgaacacgagacgcttgaatcactcggcatttttgaaacggatatcctcgttgtggcgacaggaaatgaagatatgaatgcagacattgcattacttgcaaaagaaaaaggcacagaaagagtcattgcaagcgtaggatcaccggagcatgaagcagctctgaaggagcagggaatcagcatcttttctattctgctgtcgacaaaaacgctgcttcgcgcactgattgaagcgcctggcgtcatgaagctgctcacgaaccaagagtcttcgctgtatcaaattaatatggagaacagtaaatatgatggtgtcattttacgggaattccctttaacaggtgacgtcatctttgtcaggatcttcagaggtgtggacagcatcgttcctcatggggatacaaggctgaaacttggagaccgtttaattgtcaccggatctcgggggtacgtaacggatcttaagaaaacattggaaggataaatcttgaccaaataaggattcgtgttaatatagaggtgcagaacaattcaatatgtattcgtttaaccactaggggtgtccttcataagggctgagataaaagtgtgacttttagaccctcataacttgaacaggttcagacctgcgtagggaagtggagcggtatttgtgttattttactatgccaattccaaaccacttttccttgcgggaaagtggtttttttattttcagagggggaatgatttgtgaagttttcagaagaatgccgcagtgcagccgcagaatggtgggaggggagctttgtccatccgttcgttcaaggaatcggtgacggaactcttccgattgaccgttttaaatactacgtacttcaggattcctattatttaacgcattttgcaaaggtgcagtcatttggcgccgcttatgcgaaggatctttatacaacggggcggatggcaagtcatgcccaaggtacatatgaggcggaaatggcgcttcatcgcgagtttgccgagctgttggaaatcagcgaggaagagcgtaaggcgtttaagccgtctcctacggcgtactcttatacatcccatatgtaccgttcggttttgagcgggaatttcgcagaaatcttagcggccttgctgccatgctattggctctattacgaggttggtgagaaattgctgcattgtgatccggggcatccaatttatcagaagtggattggcacatatggcggtgattggtttagacaacaggtcgaggagcaaatcaaccgctttgatgagctggcggaaaacagcacggaggaagtgcgtgccaagatgaaagagaattttgtcatctccagctactatgaatatcaattttggggaatggcctatcgaaaagaaggctggtctgacagcggcataaaagaggtggaggaatgtggagcttcacgccataacggatgacagcaagccggtagaagagctagcgagaatcatcattacgattcagaatgaagttgattttattcatattcgggaacgttcaaaatcggcggcagatattttgaaactgctcgagcttatttttgaaggcggtatagataaacgaaaactggtgatgaacgggcgcgtggatattgcgcttttctctactattcaccgcgtgcagctgccaagcggcagcttttcaccgaagcaggtcagggccagatttccacaccttcatatcgggaggtcggtgcattcactggaggaagcggttcaagcagaaaaggaagacgcggactacgtgctgttcggccatgtgtttgaaacggattgcaaaaagggtcttgaaggcagaggagtatctttgctgtcagatatcaaacagcggatttccatcccggttatagccatcggggggatgacgccggacaggttaagcgacgtaaaacaagcaggggcagacggcatcgctgttatgtcaggaattttctcttccgctgagcccttggaagcagccagacgatattcccgcaagctaaaggagatgcgctatgaaaaggcattatgaagcagtggtgattggaggcggaattatcggttccgcgattgcttattatttggcaaaggaaaacaaaagcaccgcattgtttgaaagcggaacaatgggcggcagaacgacaagtgccgctgccggaatgctgggcgcccatgccgaatgcgaggaacgtgacgcgttttttgatttcgccatgcacagccagcgtctgtacaaaggtcttggagaagagctttatgcattatccggtgtggatatcaggcagcataacggcggtatgtttaagcttgcattttctgaagaagatgtgctgcagctgagacagatggacgatttggactctgtcagctggtattcaaaagaagaggtgttagaaaaagagccgtatgcgtctggtgacatctttggtgcatcttttattcaggatgatgtgcatgtggagccttattttgtttgcaaggcatatgtgaaagcagcaaaaatgcttggggcggagatttttgagcatacgcccgtcctgcatgtcgaacgtgacggtgaagccctgttcatcaagacccctagcgaagacgtatgggctaatcatgttgtcgttgccagcggggtgtggagcgggatgttttttaaacagctcggactgaacaatgcttttctccctgtaaaaggggagtgcctgtccgtttggaatgatgatatcccgctgacaaaaacgctttaccatgatcactgctatatcgtaccgagaaaaagcggcaaactggttgtcggcgcgacaatgaagccgggggactggagtgaaacaccggatcttggcggattggaatcggttatgaaaaaagcaaaaacgatgctgccggctatacagaatatgaaggtggatcgtttttgggcgggactccggccgggaacaaaggatggaaaaccgtacatcggcagacatcctgaggacagccgtattttatttgcggcgggccatttcagaaacgggatcctgcttgctcccgcaacgggcgctttgatcagtgatctcatcatgaataaagaggtcaaccaagactggctgcacgcattccgaattgatcgcaaggaggcggttcagatatgatgctacagctgaacggtaaagacgtgaagtgggaaaaagacacaggtacaattcaagacctgctggcgtcttatcagcttgaaaataaaattgttatcgtggaaagaaataaagaaataatcgggaaagaacgctatcacgaggttgagctttgtgatcgtgatgtcattgaaattgtccattttgtaggaggcggatgagcatgttaacaattggcggaaaatcatttcaatcaagattgctgctgggcacggggaaatacccatcgtttgacattcaaaaggaagcagtagctgtttccgagtctgatattttaacctttgctgtgcggagaatgaacatctttgaagcatctcagccgaattttctggaacagcttgatttatccaaatatacgcttttgccgaatacagcgggcgccagcagtgctgaagaagcggttcggattgcaaggctggcaaaagcgtcaggcctttgtgacatgattaaagttgaagtcatcggatgcagccgttccttgctgcctgaccctgttgagacattaaaagcgtctgaacagcttcttgaagaaggctttattgtgctcccgtacacgtcggatgacgttgtgctggcgagaaagctggaagagctcggcgttcatgccatcatgccgggtgcatctccgattggatcgggacaaggaatcttaaatcctttgaatctgtcatttattattgaacaggcgaaagtgccggtcatcgtggatgcgggaatcggctcgcctaaagatgcggcatacgcaatggagcttggagcggatggcgtactgctcaatacggctgtatcgggcgctgacgatcctgtgaaaatggctcgtgccatgaagctcgcggtggaagcaggacgcctttcttatgaggcgggccgaatcccgcttaagcaatacggaacggcaagcagtccgggagaaggtcttcctgtatgacaggcaggtattcaaggcaggagctgtttgctccgatcggcccatccggccagaaaaaattgaaagaagcgcgcgccgtgattatcggcgccggcgcgctcggaacagccagtgcagaaatgctggtgagagcgggagtcggctctgtgaaaattgccgacagagattatgttgaatggagcaacctccagcgccagcagctttatacagaagatgatgtcaaaaaagaaatgccgaaagcagccgctgcggagcgccgtctccgttcgattaacagcgatgttgatgtgaccggccttgtcatggatgtgacagcagaaaatatcttcgagctgattagggatgcatcaattatagtggatgcggctgataattttgaaacccgcctgatcgtaaatgatgctgcggtaaaggaagggattccttttctttacggtgcctgtgtagggagctacggcctcacctttaccgtggtgccgggttctactccttgcctgcattgcttactcgatgcacttccgattggcggagcaacatgtgacacagccggcatcatcagtccggctgttttgcaggtagcagtctttcaggtaacagatgcactgaagctgctgacgggagaggagtgcgagccggtgctgcgctcctttgatttgtggaaaaatgagcggtcagaagtgagagcggccagtctcaaacatgacgcatgcccaagctgcggcacaaaggattttccgtttttgtcatatgaaaatcaaacaaaagcggctgtattgtgcggcaggaacacggtgcagatcagatcatctattacgaaagaagcggatcttgaagcgcttgccggtcagctgaggcaggccgggcttgaagtagctgcgaacccgtatttaatttcctgccgctcggatgatatgaaaatggtgctgttccgggacggcagagctttgatccatggaacaaatgatattgcccgggcaaaatccatttatcataaatggatcgggtaataaaaggagtgtagtgtaatgagtatatataaagcattgacaatcgccggatcagattcaggcggcggcgcagggatacaggctgatattaaaacctttcaagagcttgaggtattcggaatgtctgcgattacagcggtaaccgctcaaaatacgcttggcgttcatggggtgcatccgctgactgtagaggcgttgagacagcaaattgacgctgttgctgaggatttgagaccggatgcagtcaaaacgggaatgctctggaatgccgacatgattgaagaagtggcaagaaaaattgacgagtacggattcaatcgtgtaattgttgatccggttatgatcgcaaagggcggggcatccttgctgcgtgatgagtcagttgccaccttaaaggagttgctcattccaagaagctacgcgattacgccgaatgtcccggaagcagaaacgctgacaggaatgacaatcagctcgctggatgaccggaaaaaagcagcggagcagctcgtcaagatgggtgcgcagcatgtcattatcaaaggcgggcaccagcctgaggacaatcacattactgaccttctttttgatggcagcatgtttatgcaaatcacccatccttatatcaatacgaagcatacgcatggcacaggctgcacctttgctgcagctttaacggcccaaacggctaaaggagacagcatccatcaggcatttgaagttgcggccaactttgtccgtgaagcggtggaaaatacgctcggcatcggatcgggacacgggccgacaaaccatttcgcttttaaacgaaacagcttaaatacaagccgatgagatcaccagctgatggtgatctcttttgcgtttgctacggtatgcgcttttcatctggacaaggttatgatatgataggaattaagatcaggtactaatactatgtctttattaaatataggaggctttatacatatgaatttttcacttgaaggccgcaacattgttgtgatgggggtagccaataaacgcagcatcgcctggggcattgcgcgttctttacatgaagcgggtgcacgtttgattttcacatacgctggtgaacgcctggagaaatccgttcacgagcttgctggaacattagaccgcaacgattccatcatcctcccttgcgatgttacaaacgacgcagaaatcgaaacttgcttcgcaagcattaaggagcaggtcggtgtaatccacggtatcgcgcattgtatcgcgtttgccaacaaggaagagcttgtcggcgaatacttaaacacaaatcgtgacggcttccttttggctcataacatcagctcatattctctgactgctgttgtcaaagcggcacgtccgatgatgactgaaggcggaagcattgtcactttgacgtaccttggcggagagcttgtgatgccaaactacaacgttatgggtgtagcaaaagcttctcttgatgcaagtgtgaaatatttagctgctgacttaggaaaagaaaatatccgcgtcaacagcatttctgccggcccgatcagaacattatctgctaaaggcatcagcgatttcaactctatcttaaaagacatcgaagagcgtgcaccgcttcgccgcacgacaacacctgaagaagtgggcgatacagctgcgttcttgttcagcgatatgtcccgcgggattacaggtgaaaatcttcacgttgattcaggtttccatatcactgcccgctaagcaggatctatttcaagcaatcccgaatagggattgcttttttatttcttctgattttcagctttctgtcatatagatagaatatgacacaatcggagggatgaagatgtctaataagaaaagaaacgcggataaaaaaccgctcatgtatattgttcagccggattatgcagaaactacaagatcatccatgcaggagattgtcatcaaaagaaaggccgacaaacccgctccgccaaaagctgaggaaaagccggtttaccatgagaagcagcaggaggaagctgtggcacaggatgtcctgcaagaagaccaaaagcctgcagccgaaccagtgagtcagcaaactcaagaggtgagagaaccagagaacataaaaagccaagaggaacagaaagcagagccgcaggccgtagaagaaaccgttgaacacgagcccccgaaagcagaaaaaaaggaagagcctgcacttgaggcccggaagcctgagaaagaaccggaagctgtccatagtgctgataaagcggaggaaaaagcaccgccggcacgaaaagtgaaaaaaccgatgagcaagatgacgatccacgaaaaaattgattttttaacaaagctgcctcataacatgccgagagcgctttgtttgattgaagccaatggaagaacgtacaggggcgtgattgtcggaagaagaaatgattccgtcctgcttcgaacaaccggaaacggagccccaaccgaactggcaatcgatgatattacctctttgcacccgctcggtttttaacgaaaaagaaaaaagctgcccggctgatgttgccggacagcttttttacatagagaaaagcctgcggcttgcaagcttttccagcttatgattaatgctgatgatgtgtacgattgattaatcgaggatttaagcagttgattgcgcagaagcagtctaagtcaacttcaatacagtagttcgttttttcgagtcggaacacttcacacaccgtatctttatcggtgaagtccaaaatgtgtttgtgttcgtcaaatgcgattaataatgacagtgttgcgcagcttccatgcactctttcgaccctgaaaaatactgtattaaagcaagggccgttatcgagttcgccgacatttccgaaggcgactaatggcgttgattttgatgtaaatattgcaaaaggcactgtgtcgcctaacgaatggcttacagataaaagcttagagtggcagccggtcgggcagtcttcttcaacagcgttttgcagatcttcaatattttctacagcttcacgcacgcagcttgatgttttctggctcatattatccctcctgccttataaatttgagactggcgaaatgatggagagtcagctgcctcacgcaggaagcagctgaatgatttgcacctgtaatagagtttggaaggggattcctctttacaagtgtttatccattgtgatgatgctttttatctttatgaggcgatgttctgtcaactagctctggtgacaggcactgaatcgcgcagaagcatccgagatccacttcaatgcagaaatctgttttttctagcccgaagaaatccgggtcgcaaggatggcaaacacttaaggtatcgcctttaacatcgacagggcgtaaaatagacagtgttgcgcagcaatcacataatttttcaacgcggaagaaaatggattcaaagcattgcatatcatccacaaatccccccacgtttccgaatgtggagaacaatccgccttttttatcaaacaagagaaacggaattgtgtctttacctgcaattgtcggattcaaaaggtttgtatagcagccagtcggacactgttcctcaactgcctcctgctctgctaaaatcttttccactgcatcgcatacacagttctcatgccggccatgggtttttccgcagctcattgatttcagctccttctttatagggtatttgactttagtccttaacaacatatgtacccgtgccccacttggtgtgggtgaacgtctatatattcatcatatgcttggaaaataagaaaaagcagagcgtttttagctctgcttttaggttctagaggacaagagtgatgactaggacagcgatcagaacgtttgtagctgtagagacaagggttgcgatatcggcatctactgttgtgacgtttacgccgcgggagcattcgataagaagtttctggcggtttacttgcttgttagctgtaagctgcaataaatcttgtgcgactaattcagcaataacgccatctgcaatggaggtgagagctactgtcaagacagctgcattaagcgctgttacaatagatgttacggcttgaacgtctgtagatgaaacgttgatgtcacaagagtctctaataataatcgtctcatctgagacttgtttgttgagatttgcctgagctagatcttggtcgataaaggcgttgttgtcattgccaaacccattgttattgcagcaaatatcgcaattgcattttctttcttctttttctttctctttgtgctctaacggatggtcacagtcaggatcaagtgcaacccaagagtatggtctgctttccatatctattcctccttttcttttactgttattaaatgagcgagcctcttactttgactgaggcatttatcttgatgatgtgccctattttttatgattaatttgaattgttattgttttgccgtctttgtctgagctgttcaatgagctgctctctgcggctaagcggtttatcgctcttttgctcttgtacggcttcttcttcttttttcttcttgtgtttttcagctagctccgctgatttcgcttgcaggtcttttaccatattcaaaagcatttctttttcttcatctgatacttttttcattttgtcttttgtgatgccgtgttttacaaatatgttttggaccagcattttcatcattggatcaacttctgggagcttttcaagctcttctttgattttatcgttatctgacatttgttctcacctcaacttttagtttgtgaaaagaaagggttaaaggatgtcgaattcaagtagcatactgtttaacacctgaagcaagatttgtacaaaggttattatttcgtctgcagacaaagtaatcttgatgtttcggctgttgataattttaatgatggttctttttttgatttgagagttatcgagaatgagtatttcgcttgctactgtgtcggccaagtcctcgtcggcaataacgagctgtgtcagcaggataatcaatgttgtaaccaaggcttgtatagaaagggcagatgttatatgtgacgtatctattgtgatattttcgcaatcaatcacttcgatctgctgctcgaattcgcttgataattgctcaaatatgtcaggatgcagggattcaatttttgtttcaaatgacataaccttcactcctttcttatccatactctatataatgcaaatggggtgcagagcggaataataaaaataaccaattttctgccggacaagatacaattcatgaagaatagggttttcgcatatatgtgaagggatcatgattggcaaaggagtgaacgagtggttataaatgggctgacaattgttcttctatcgcttgcggtctttcggctcgcccgcctgctggtgtttgacacgattatggcgccgcttcgcagtctgtttcatgaagagaaggaagaaaaggatgcggacgggaatattcaaacctatatcgtgattaaaggaaccggtgtcagggcgtttattggtgaattgctgagctgctattggtgcacaggcgtgtggtgcgccggctttttgattttatgccaggcgttgatcccgcaagcggcgcagtggctgattttacttttggcgatcgccggccttgccggcatcatagaaacgctcgtatcaaaatggctgcaagaatgaggcgttaccaccagcaacttttcactagcatcagcataaagtagcatatatgacataaggaaaggaagggaacaaaatgaatcaattcaataaaccttcccaaaaatctccatatacagattcgtcgtatcaatcaaaaaagataaaaaagaaaggctgcgggtgcggaaataaaaagaaaaagcctcaatagcctggcaaagaaaccggagaactccggttttttgttttttaacggagcggcctcgctcagcatatatcataagcggggggataaaagtgaatgagtttgaaaaatggatagaaggaagatatgaaccacacgaacaaaagcaaaaagagtatgaagacacgatgggccgtatcagaaaagacttggatgcatttgataaagccggtctggaatttgaagatgagattgaagagctggctgaaaaaacggaggccttacttaaaaaacatcaagctcaatatgatcaatcgtaaatccgcaaacgccctatgcgaatatccaagccgatccaatcagctcacatagtgtatagagagtaaaggaggtgcttatctatgggctttggatacggattcggcggcggctacggcggcggctgttatggcggttatgctggcggttacggcggcggctatggttcaacatttgttttgttggtcgtattattcattctcctcatcatcgtaggtgcatctttcttttaagatgtattgaggaagtacgggttataacccgtgcttccttgccttgtgtttatttttaaaaatgttggaaaagcacattgtattatgtgcattcatacaataccgtattactccgccaaaaggaggcgcattatggataatcaattttttaagaacatcgaaaagaaaacaggtgtgaagatgcaggatgtaatgaatcttgccggatcactccaaaacgctaattttaaagatgaaaatacagtgcgcagtgtgattaaccgcgtagctcagatggcaaacagacgcgtgccaaaagaattagaagataaaattgtggaatctattacaagcggaaaagaaaagcttgattttggcacgatttctaaaatgatggataataaataagtggatggcctggctgactcactgcagcgggcctttttttacagtaaaaacccggcagtaatctgccggactgttaatgatgcaagggctgtcttgctttttgtagaaggggatacaaaaatcttgagcggttggctgttttgccgcgcctgttagcggggcaagacaaatataaatgctgtttcgcccgggtcatggctacatataaaagacgtctttcctcctcaagagcggcctcgtctccttttcttgccgtttctaatgagaaatcgtgcggaatcgagccgtctacagtgcctaacacgtagactgttttgaattcaaggccttttgaccggtgaatggtcatcagctgaacgccatgttcatccgttctgtttttctcagcggccctcatatggtctacgtgggcaagaaagtcaggaatcgttttgaacttcttggcgacaaccttgatgtcgcgcaggtcatcggaacctttttccagcttgttgccctcattgccccgcttttttaaatactcggagaagcccatttttccttctgcaaaggtgatggcttctacgggcttcatcgtgcggaggcttgcaaaaaacggtacgattttcttgattttgtccagctggaatggcttcagatcaggcaatttggccagcgctttgatcatggtacagtcctctgtaatcgagagcgccttcagcgtattcaaagcggactgttttaaaaacaaggcgggaagcaagtgtttaatcgcctcggtgtcatcctcattttggctggcatacaagtaggcgagaatctggcggacgatccgtctgctgtaaaacgattggacgccgcggtcagctgtatacggaattgatgattgatgaagcctttcataaatagcacggcctccgctgtttgtgcggtacagaaccgcaaagtcttctggactggctccattttgaattttttctttgatatcggaaacgaccattgtggcttcttcctcttcatcataaggataaaacagcacagggacctgaatgtcatcgcgggccgcttcaagcgttttggcatatctgtttttgttctttttcacaacgatatcagcactagagacgatcgggtgcgtagacctgtagttcgcagttaaatagatcgtcttcgctcccggataatccttttgaaaatcaagaatgaaagacggattgcttccgcgaaacgcgtagatggactggtcatcgtctccgacacagcacaggttttgctccggactggcgagcatttgcatgattttgtattgaaccggattaatgtcctgaaactcatcaattaagatatacgtaaaccgagattgatattgttccagaaggtcaggccgctcgataaacaattcatagcaggctgaagccatgtcatcaaaatcaaattggctgtgttcttttttctggcgttcataatgttcatataaacgataaacttgtttttcccactcatcttttagagggatgcgttcatttgggacataagtgtttttccaaaaaccgatctgctgcagagcttggtcaactgggaattctttctcatcgatgccttcttcatagagtgcttttttgatatattgttcccgctgccactccattttcagcagatgctcaccgttccatttagcagaattagagtgatacaagatcttataaaacagactgtggaatgttcctgtcacaagtcttctgacttttgccggctgtaatccgtactggttggccatacgctctttcatttcagcgacagcttttgttgtaaaggtgacaagcagcatattttcaggcggtatgcctaagtgttcgatcatgtgggcggcacgggctgtcagcacccgtgtttttccgctccccgcacctgcaagcacgagcagcgggccctctgtttccgtgacagctttcagctgatccgtgtttaaaccgacagacggaaaaaggctcgtatcgggttctattgtttttggcacaaatggtgttcctggtttaatgcttctaggacggtgccattccgtaacagctggggacgggtcagcggcgatcgcttttcccttgggtaaacgaatgacaccagattcctgatcgtcttcttttttttcctctttagagggcttcggttcgcacgcctcctcacatgccggaaaatcgcctggctggcgatggataaactctggcggatcggcgatgttaagccgtaacaaaacgggctttccgcaatgagaacaaaataaatgtccttttattccctcttcaaagaggaattgataatgttctctcgaatatgtatgtaaatgtatgattctatcattcagtcgggcgcatttcaaaaaggggtcctcccaatcaaaaggtgttcattacagacaatgactatcatatcaaaagaaatgtgtttcaaaaagtaagtttaagggaaaagagacagcagaggggtgggtattgtatgatatatgcaggtcaaattcagaaccagcaatacgctcaatatgctaatagaacgattggacataagcaggattatgccggaaccgaaaaaatcagctatgtcccgtttcagcgggtatacaaagaactggaaaagcagcaggagaatcaaacggcagctgaaagaaaagtaaacgagatgaaacgtaagcgctctctttataagagattgcgagaaaaaggaatgggcacatatattaatcgatatgtataaaaaaccgttcataccagagaacggtttttttatatgcagtaaaaatccggatctcaaaagatccggatgcgttcagtccttcatcatttgtaagtgcggaatgccggcatcgaggaattctttttcagaaagcacgcgatacccgtgtttcttgtaaaacggcacagcctgtgtttgcgcgtttaaaatgaaaccggaagcgcctccgtctgccgcggctttttcgagcgctttcataatgatgccgccgacaccggctgagcggtggcttttcagtacgcaaatccgctctaacttgccgtagccgtccttcatgcgccatcttccggcaccgacaggcttttcaccgtcatacacgatgatatgctctgactcattttcaagttcgtcaatttcttcttcagcaggcacgttttgttctttgacaaagacttcttctcttacatagaatgcatctttcagttgttcttcattttttgcgataactgctttcaaacattattctcctctgcctagcaagaaggtttcatatactgtccacgatccgttttccagctggtaaagcaagtggaaacggtcaacgatttcttcatgcgacacttcctgcatttttaattgtcccagcacatctgaatgctcatcgtcggagagattttggccgaccgtcacatgcggaacgaaattatattcctgttctcctgccaacacaccggtgtatagcttttcattgagtgtttttaactcttccgtcggttctgctttgatgtaaatgacattattgacaggcgcaaatgagctgtattttgtcattttgagaacgagtgggtgggactcttttgcgatgtttcttaaatgtgatacgagctgatccgctttctcctccgcgcattcaaaggatgctctcagcgtcaaatgaggcgggattagagagtagcttgggtcatagcgctttctgtaagagtttgcaaggtcttggagcttttttgatggaaataaaacgattccgtatttcatattatgtccctcctggaaataaagtatgatagagtgttaaagcatttttttcagcgccggggtgatgagcggctgccagtatgtccatttgtggtctccgtcaaatggctcgaaatcataatcggaaagctttttctccagcagctgtttcagctcccggttcggttctgtaaagtccagaatgttcccgtctgtcgtgtggacgtcagtttcttttgttccgatttggtgataaatagagaggtgtttgatatcgtctgactgttttacggcttctagtacgtgtttgtcaacatagggagactgcatgatgatgttgccaaacatattcggataatcaagcgctgtcataagtgacacggttgctccgagcgaatcacctatcagcgttcggccgtaaccgatctgataggttggatactcatcatctgcaaaaggaacgagctcatgggcgatgaaccgtttataagccgaaaattttgaaccctccggatgataggtgtttctgcgctcttttacatccttataaggaacaccgataataatgctccggtctatttcgcgtttcgacagcaattcctcaacctgtctgccgattctccccagcctgaaataatcgtggccgtcctgcgcgataatgacatggtatttataaagcggggagtagttggacggcagataaacaagcaaggtcatttcctcgttaagctcttttgaaaagaatttcttttcttgcactgtgccgtttttcggtgccataaaaacattcctccaggacatcactatactttcttgcattttcaattattgtaccatgaattattagaaatttctctctttaaacggttcggcacacgaagaaaaaagtgttgaaataaactgtgaattgcgctaatataaaacaatcagaaaattgaaatcgatatttcttatcgtgagaggtggagggactggcccttagaaacctcagcaaccggcttgttttgcatgtgcaaagcgccaaggtgctaaatccagcaagcgttttttatgcttggaagataagaagaagcgttaaaccccttcttcttatgaagaaggggtttttattttgaaaagggaaggtgtcagctatatgtcacagcacgttgaaacgaaattagcccaaattgggaaccgtagcgatgaagtcacgggaacagtgagtgctcctatctatttatcaacagcataccgccacagagggatcggagaatctaccggatttgattatgtccgcacaaaaaatccgacacgccagcttgttgaggacgccatcgctaacttagaaaacggcgcgagagggcttgcctttagttcgggaatggctgctatccaaacgattatggcgctgtttaaaagcggagatgaactgatcgtttcatcggacctatatggcggcacgtaccgtttatttgaaaatgaatggaaaaaatacggattgacttttcattatgatgatttcagcgatgaggactgtttacgctctaagattacgccgaatacaaaagcggtgtttgtggaaacgccgacaaaccccctcatgcaggaggcggacattgaacatattgcccggatgacaaaggagcacggtcttctgctgatcgtagataatacattttatacaccggtcttgcagcggccgcttgagctgggagctgacattgtcattcacagcgcaaccaagtatttaggcgggcataacgatctgcttgctggacttgtcgtggtgaaggatgagcggctcggagaggaaatgtttcagcatcaaaatgcgatcggcgccgtcctgccgccatttgattcgtggcttctgatgagaggaatgaagacgctgagcctcagaatgcgtcagcatcaggcaaacgcgcaggagcttgcggcgtttttagaagagcaggaagaaatttcggatgtgctgtatcccggaaaaggcggcatgctgtccttccgtctgcaaaaagaagaatgggttaatccgtttttaaaagcactgaagaccatttgttttgcagaaagcctcggcggggtggaaagctttattacataccctgcgacccagacgcacatggatattcctgaagagatccgcatcgcaaacggggtgtgcaatcggttgctgcgcttttctgtcggtattgaacatgcggaagatttaaaagaggatctaaaacaggcattatgtcaggtcaaagagggagctgtttcatttgagtaaacacaattggacgctggaaacccagctcgtgcacaatccatttaaaacagacggcggaaccggggcggtcagtgtaccgattcagcacgcctcgacttttcaccaatcttcatttgaagagttcggggcatatgattacagccgctctggcacgccgacaagaacagctctcgaagaaacaattgccgcattggaaggcggaacaagaggatttgctttcagttcaggcatggctgctatctcaacagcatttttactgctgtcacagggtgatcacgttcttgtgacagaagatgtatacggcggaaccttccgtatggtgacagaggtgctgacccggtttggcattgagcatacgtttgtcgacatgacggatcgtaatgaagtggcgcggagcatcaagccgaacacaaaggtcatttatatggagacgccatcaaatccgacacttgggattacggatattaaagcagttgttcagcttgcaaaagaaaacggctgcctgacctttctggacaatacattcatgacaccggcactgcaacgtccgcttgatctcggcgtggatattgtacttcacagcgcgacaaaattcttaagcggacacagcgatgtactctcaggtttagctgctgtcaaggatgaagagcttgggaagcagctgtataagctgcaaaacgcgttcggcgccgtccttggcgtgcaagattgctggctcgtgctgcgcggcttaaaaacgttgcaggtccgtttagagaaagcgagccaaacagcgcagcggcttgcggaatttttccagaagcatccggcggtgaagcgcgtgtattatccgggactggctgatcatcccggcgctgaaacccataaaagccagtcaacgggagcgggcgccgtactatcttttgagcttgaaagcaaagaggccgttaagaagttagtcgagaatgtgtcacttccagtcttcgctgtcagccttggcgccgtggaatcgattttgtcctatccggcaacgatgtctcacgcggcaatgcctaaggaagagcgtgaaaaacgcggtatcactgatggcctgctccgtctgagtgtgggcgtcgaacatgcagacgatttagaacacgatttcgaacaagcgctgaaagaaattgctccagttgcggttcgttaaaaaagaagccggggatggcccggcttcttttattattgttcgtcatcaggattcagaatcgcgaggacttgatgatcctcccaaacgccattaatttttacattttttcgggcgatgccttctttatgaaatcccgctttttctaaaacacgcatggacccgagattacggggcatcacaccggcttcaatccgatgcagtttcaattcgtggaacgcataatcaacaaccaatctgactgcctctgtcataatgccctttccattatgggctttgtctaaaaaatacccgatgaacgcagtttgcagcgcgccacggatgatttgaaagagcgaaaccgtcccgattaatctatcgtctgacgctgtaaagatgccaaaatgatattcttcatctttctcaagtctttcctgatactcggttattcgttttctttgcccctcaaccgtatagtaatcgtctgcgcgtatcatagaaaactgttcgaaaaaatcccgattttcgctttgcagccgcaaattttcttcggcatccgttacttctaaaggtctaacataaatggtttttccttttaacatacagtgatctctccgttctcatgtcagcattcctcttacattattctcagggaaatgcaaatatcctttttataagaaggaagaaaaccaatttcccataaaagtgccaacatagttgccgattaagtagccgagcgtaccgacaagcatgatcggggcaacaagctcccgccatcccttggcaattgccatcgcagccgcagtcgtcggtcccccgacagtagcgttgacggcgagcagaatttcttcaagctgcacacggaacaattttccggcagctaaggaaaccgctaaattgctgatcgcaatgataaacacgaataatagaataagaggcgcattcgtgacgattaaacggagatctgcaggaatgccgatcaccacaaaaaacaaataaatcaaaaaggttccaagttcctgagatccattgagcctttcaaaaaaacgtgggaaaagaaaaatgataagaacagttaaagacgtaagcaccaggtactgatcaccaagcgtaccggtcagcaggggatgagaaaaaatgcttttaaaataaccagaaaccttcatacttaccgcaacaagtgcgaaagcagcaccggcattaaaagctatatcctttaaggaaatatccttccgtttccaatagctttcagcactgtttccgctgtttccatcggcttttaccttctcttcaaacggcatggcataatgccgctgaaaccatttgagtgcaggaatgctgattaaaataaaaaacaaaagcgccatcataaaattatcagccacaacggtagccgacacatattcaccaggcgtctcaaattttgccgccatcgccgcaaagttgaccccgccgccgatataagaggcgctgatcatcccgccgattttatcgagatagggaatatgctgtttaagtagaaaaaaagcaagaatgctcccaagcacagtgccagcggagctaatcagaaaaataaacagcaaacgcctgctttccttaaaaatttgccgaacattgatctgaaacaataaaagtggtatcgccagcggcaccacataagaccacacagtatcatacacaggcgactcaacaggaagcactcctacatttgtaaacaccatagcacctgccagcgcgataatagcacccgacacagcggacgcccacttaaagcgctgctccagcccgatgctcactgccgcccacaccgcaataaacccccacaatacccatacatcatcagaagaaatcaaagaatgcaaaatcccatcacccctattgttagaaaattaagacatattataatagccggggaacggaacagcaagtccaaaaaaagtttttctaaaaaagcagttgacgaatagaagggaaggttatataatagaacttgtcagaaagacaataacatacccagcaacacatacatatcatgattccgtagctcagctgggagagcgctaccttgacagggtagaggtcgctggttcgagcccagtcggaatcatagcttaaacccttgcgcagcaagggttttttattttgcttatttattgattttgtctcattcatcgaattggggacgaaattatttttttgagctgattttgacgaagaatctcaaaatcaactctgtttttgtgctaggtttctaggatcgaactggttaaagtgttttactgtgctattttcgagtttctcggtaacgtggccataaatatcactagttgttcgagcactggcatgtccagctcttctttggatagcaactgagactttcgccagcttccataaggagagccaccatagtatgccgcaagtcatgaagacgaacatcttttaggccgtacttcttttttaattttagtccattttgcggtaggggttgtatagtagtaaggttttcctttaccactgtgaaatacaaattgatgttctccgccttcccaggcatcgccaagcaacaatttttccacttgttgcctaaaaagacaatcaaacgcttaagtaattatatcttcaatatccaattatctattctatcgcctctttccatattaaaatcaactctaaaaactcatcagtttctataatactttcaaaaggctcatcaacccggtaatgatgttcagctattgtcttgtttttcttaattattatacttgtagcattcaacgtaatttcaaagtcttcataatctcctgttaaaaccttcttaacgtatccaatatactcgtctgcttcctcttttgttgaaatatcctcaaaaacgtccgagaaaatagttaatttttccggtagtattattcttgtgataccaaatggatctttttttaattgatatgtatatctcatcttgtttatcaccttctatgttatttattatacaaaggataagcagtggctattgtaccatccttgtttaagaacatttctattttaattcctgttgaattttcacctataaacttattagcacctatcttttttttattttgatacgcttcatcaatagcctttaacacatctacacgattccattcctttggaaaaaaactagatttggctatttttctcttcccgcttatttcaacattggcttcataaacaccatttttatcaggtgttttctcggaaccaggtataatttttccacccatcatactttcatgatgatatccaactgctttaccgcgtctattaatttcaccatggtaaatgtgtttcatcgttcccgtattatatttacccgtatccttattgttagaacgttcagatcttctgagaacactctcttttttattttcaatcatactttttaggagaggagtattttttgcgttatacgtattctcgatgtcttgtgcaatcccaaccagtgcaagatcattcttatttctaataatagaattgatgtaagatttgcctttgtttattcctttattgacatgagcagcggctgttccaccttcaaccactttacctactttagaaagcttggtagtggtttgcaccgcggcacccgcaccttttggaccaacgatatttccgatcacataactgatataatgacctttttcatatgcatcaccatttaccattttatcattccatgaatcggcgaggtttgtccagatgatttttgaataagaaggtacgctcaaaatggttgtaattgtttttgtcagtttcagttcgatagggagctgtgaatattcccatgcgcccacagctaagtctttgatgccatatatggtatcgtcaatcacatcgtcaataccatcatcaactccctcaacgaaatcaattactgtcttgctggcattgattatacttttaccgacggccttcagctgttttgcttgttcaagctgcactgcgtattggagctgttcaggggtaagattctcatagccgaccttcttggcaatgtctaagtattcatctggatccgtcactccgtcagctagcttctttttcagctctttgatttctcgttctttcgcttcatctttcttgatcttcaaataagcttcagtctgtttctcgatatcgccttttttcttatgtatgtcactttcacggtacgccttggcgttgtagtgaatgggcgtagcgtttttcccttttcctgtggattcctcaagcttttgaaagtccttcttgatgaattgctcgtttggctctgattgggcatattcagtaacaagtgcttcgtccacgctgcctagtttatcgactgtttttttgcgtttgtcctctgcatctgcaagttcgtctttaaagtcttctgtcgagaacaaatcaagtgggaggatgtcatcgatatcatgtaagatatctttcaacgctttcttttgttcagacattatggattttgattttgtgtaggcgttagccagttcgtgttctaagaaggattcttctatatatgcatcagacaagctggcgtcctctaaagtgcctgaaatgcttgttaagaaagcaattttcatatcaagtaagtcaatccaattgtcagctacacctgcgtggtcttgataaaatgctttaatgttgtcggcgcctttgccggaaaactcactgtcatctaaatcagctacagctttaaaggctttctttagattgaccatctgacttcttaattctttgtattcctttgcacgtttatctgcttctgaaagcagtgatttggcttcaaatactttcatgttcatatcctttcgtttgaatagctccaacaagattttaccatgggaaaatgaagaaatagacagcgatgtgattcaaaagtgtgaaatgaataatttgatctgtgtcaatttacctatttggattatttgtttggaaactgatgacgcagtaagacgattccagctgatgaatggtttaaatcctgatggcatttatggtcctaagactaaagctaaactcgaatctcttcttaaataaaaatagccctcctcaattggagggctatttttatttaatagaaacgtgatgtgtgtaccagtttccggttgcagtgaatcgtaattccatatggccgtggcggttacctccatactttacaaacgtgtaatcagaattggcgattgcatccttagccgttttatcaatgtttgcaattttcttggaagtgattttaccattccagccagcaaaacctgaagcggatgcacttggcgggctttcccactttgttattttctttccatactcgtatgaatagttgtcacttactcgaatatcatataattttatccctgtaaactttacagcgtaatagccacttgcagttttattttgggtggcctgtgtttttatcttttccattcccatatctgtacttacgcccatttccacagtgaaaccattaccgagatcaatttcttgatatggatgatctttgctgacatgcatactgtttaaagccttattcacttcttttacagttgggattttctcagatgaaagggttctcaagtttttttgttttgttatctcgtgaaaggtcgccttatcaataatcagatcagaattcttgtccactttttcaacagcatctgcactttgaagactaaacagagatgaaaaactcaaagctagggcaaaaaccacacccacaagtaactttttcattttatccctccttaatgttttcgtccccatcttatcttaatgtataatattggtaaatgagacgaaagtaacaaatgatgctattgattaaagtattaggctttgaaggaacgggaagatcgaaaagtaaatgaatggttttacccatttaaacaaccatatatcaggtgtatattggattgtaggggagggatatcatggtcaagatcatattggcatttgtttatctatttggcttcgttgtgttgagcaattgggctttcgacggaatattttcagagagctatttctcgccaatcggtttcctttggtctatcttatttacatttttcataggggtttataccggcttgcctttaatctacaaaaagtttactcaatcaagccgtttgactttgaaaagtaaaaagccaatttatttcactatcggtacagctgttattctctttgggctttattttctcaaaaacgaaatcgccccctatttgatgctatgtggctattttttaactctggcatcaggtatagccctgaccatcttattacagcccaaaaccaacaactgtaaaacagtataactaacaagaactaatgaaagcccgtctcaaggcgggctctatatcaaaagaaagggaatttttttgtgatatctatttacaatggtcaatagatattgtataattaaggtatagaaaggaggtgctgaagtggacgaggtaagaaactggattcttgctatcgctggtatcgtgaccatcattaaacacatctacgacatatggcagaaggaaagcgaaaagcatagcaagaaaaagaaaaagcgctcccgccgggtaagcaagaagcgctgatacacagtgagcaaaggggagtaaatccccttgctcataccattatatcacgtccacgataatatgaaaaaatattttaagcagtacaacacagcagattttgccgttttgcttatattggttgccgggatcgtcgcaattgatttgaccgatgagggtatgtctggaaagattgcgcatactgtattgatgatagccgttgttattaccttgttaaaaggattcattatgatgtggagagaaagccgacatgaaagaaagcgaaaaaattaagtttatccaggaagaagttttgactgcagcggaagcgggggagttgcttggaatcactcggcagcgattaagcacccttgtgacttcaggaaagctcaaaccggttaaaaaggttgggacagttgcattgtttttgcttggacatgtacaagcccttaaaaaagaattagaagcaggccggaagaagtaccggccgtatgatgagtgaatcccttctcaagatgagaatgattacttgtcctacttttgccacttaataatgagtggtaaattttatcaatttttgatatcctgtaattaatcataattgcgggggttcattatgaatgtatctgaattagttatttttccagatttattaaagttaccaaaaagcgatttggaggacatttgcaccaacgaaggtattgcggaatctggaggggcttttgaactagcgaaaagaatatgggattatgctgatacgtcagaaaaaaaaacaaagaatgtttacaccgtattgtcacaaattttttgctggtaatacgtcaatttcttggtacacttgtgatagccttgaagatttaagtaaatatattattgaaaaagaaaggcacaatccatttgaaacaaaaattccgtatgaagaggcaaagctaaatacgactccaaagttaagaagtgcatctagaataaacgagcattcatattttttaaggtttatatataaagatggtactcgtaggattataggtgaagatatagaggttttaccgacaaataaaacggctacagcttttatagatgaactaaacggaattatagaagttagagctaaaccaaatgatgctgaaaaaatagcagaggtaattgctgggtatgcaaggcagcaactgtctttacacaagcaaaactttattaaacctttcgggggtagtatagaaagtatagcggataccctaggtggtaaactttacgagtccaaagcaagtcctgagttatggatggacaactttggggaagaagaaaatgaagcattgcttgatatttttgaagctttaagtaaatactttgagaacggagatatagataaacttcaagaatgtttagataatgctaaagagattttgggtggggagctacttagtttaccttttgctgtacttgtacttgctggtatggggaatgtaggtttaaaagttgaacaaaaagatttaaggaacactactttatacaaagtatttaaaccctacttacaaacctcgggtggatatattaaatttgaagttgaggaaaatggtgttcagcacgagttttcaatggttgttggagttgaaagccagagcatctattttcgctctaaaaagactacagaaactgtaataaaaaaggtaagagaaaaacttttattgcaaaaattagttgtgtaaatatttgaaagagggtgatcttatgggtataaattggaaacaaaaatcagaaattgacgaagtgattaaagaaatcgcttgttcaagagtaattagattttatccaacatatattagtaagatcactttaattaatttagatactgtttttgaatatttattggagttggtagatgacggatctctaaatatattgtgggaaataagatgtcctgactttgattgtaactctgtaattttgcgaacacataatttatcagaaataatgggtaaagaaatagaatgtgattattgtgaaaatggtctattagtcagaagacaacatgtattccctgtttttgaaataaatgatgactttagagaatttttaaaacaaagtaaaaaaaaacaagtgaattatctacacgctctataagttcaccaattctccaagaaaaagcattaatttctttagaagacattaatttattactagaagaccgaactaaaaaagaattgaatgaaaaatctggagtgaatatatataattttttatacgttgagggtgattatgtggagaagaaacaatctttgggtagcgtaaaaattggcggaaatgtagggaattttgcaatccaaaatgaaaacacaacacaaactaatggtaataatgaagtaagcagagcatttgatgaaatttttgaacgaataaagggaatcgagaacgatgttcaaagggaacaggccatttttaatgctgaaatattaaggaatgcagttgaagagaacgatgtagataaaggaaaaagagtattagaatttttaagaaattcaattgggacaattggatcgttaacgaccattgctaagttctttggtattactatataaataaggcccaaaagggctttttttatattatccactttttctgttgcttcttcaattcacctttcatcaaaaggctttttacagctatacgaatatcctcttcactctttcctgttttccttttcaaatcgtccagagttggattctttccatacaaatgcatattcactatgatctgatatactttccgttcaaaatcagtcatttgatcatctcctagaaggatgataatcgaacgtatgttcccttgtaaataagttggatttggggacagatggggacgaattggggaccaacttgttcatttttagtcaaaacagaagattttttatcagaaatacttgtcagaaaaccccataaaataagatttcgaaataaaacatccgttcgtgtcagaacataatcactaccttgacagggtagaggtcgctggttcgagcccagtcggaatcatagcttaaacccttgcgcagcaagggttttttattttgcgttaataaagccggttcgtcaaattcgtgagttgttggcgaactgttggcgaaattcattgaccgcagtccaaaaactacctccaaacttacttgattagttcaatagtaacaaacggaagatcggatttctgttaaatcttcattgagaatagccagtccaagaccgtcacttcagccatgcatcttttaaatgaaattttgtactgaaaacatcaattgtatttttaaattctgctctagaatcagcccctttataataatcttgataaattgcttggggtgatactgattcgtgatttgtgctatggtttgcaaggcttgtagcaaaagcaggagcaacagaaacgagtaaagcaagggataatgcagaaccagttaaagctgttttcaatttcattttaagcacttccttttttaaaatacaactttattattaaatggaatacaaaaatatccaaggtgttttttgttagtaagttgagttagggggattggatggcacttagaatattgtttctgctgatgggatgttgattctggatatatttccaacacgattacaggccggacatgaaagcgaaccttgctttgatcggggcaatcatttcatttaaagctgcggtttactttaaagatattgatgtattgagagaagaggaaaacaaatgaacggaatttctgagcgttggaacgcgtttaaattacaaaaatcccctgaaccactctagatcaggggattgctttcccaacagcttattaagtagcggaaggcatgatcaacgatttagtatcaatttattaattgcgaatactagaaacataccgttttccgccttccttagaagtaacatattcccgaggaacgttaagtctattggtagaatgataacttacataaagtttcatatttgctcggctcgttacgatagccgtatgatccatccaaccatcagcatagcgaagacctattttattatggtaatcatagtgatatacatctccaagctttacatttgaatatgtatcagaaacagtcttcatttttattccgccagcttttaaaatgtatgatctaaaggctcctgcattaacccaagcatctgtatagggtttccattctttaaagtacggcattcttccagctcttaatgcttgggaaacaaagttagtacaatctttgtctttataatatttatagtttttatttggttttaaggcatatttttctgcatatttcattgcagcgtaaccactatatcctttaacagatgttgcagtcacagttagttgattagagttagcagcattgaagttcatacttactggtttatcttcacttttcacttcttctttatcatcatttttcacttcttgcttataattttttaaaaattcatctaatttaacatccgaagaatattcttcatcattttcatattgtagagttgaagaagaattatttaattgtgttacatttagttgcttagaagaattactcaatggtattacatttagttgattagaagaatttttaacttgagagaaacttagattagaagtatttgttgattgagaactttgtttattagaagttgttttgggaatttcaagtttaatattatcgcccagagatgttgttactttttcaacaccaaaaacaaagtttcgagtaatataagcttcaacaattagcttattgtttttttcagaagtcttaacatcgtctatatcgtatgtaaactcgtggaatttttgtttgtccactttacttaacgcagaatacagtaagactccttcgtcggaatcagtcaatttagactctttaggatgcgctaaaggagtgttgtgttcaaaatcatatttctgttgttctaacatatccttaactttttcgtaaccaatctcgttggtaattgaaacattttctttagtctctttattagtagtggctgcaaaaacttcatttgttgacactaatggtgacaatgatagacataaaactagtgaagaaagtaattcttttttcatacgaaacctccaataaaatctaaatataagtaatatttatcatttacaccaattgaaatatggcataaaatacatgtaataatataacataaaaataaatacataaaaaggtatcggaggaaaaaatgaaaaagaaaactaaaattatactttctctcttgacagcacttattgttatattgatagtacttccagttctatctcctgttgtctttacagcttcttcggaaaaaggagcaatcagacacgaaatttataaaagaggatatccctaccaaagctactttgcagttctccagaaaagagaaggagacaatgaatctgggaatctttattatgtaaattggctagattggaaagatgaaacagggcaaactcctcacttatgctattcgaaaaaagcatcagatggtgaatacgaagtaagttgtggcacagggccgtaaaaataaattttaaaattgaataagtccaagacggaaagcctgcagacactgatcgttttacagagaaatttgtgcttcgatcggtgtccgtttttttttcgcaactaaccatatgtctatcgcgattactagctatgaaaggagtaattagacatgaaacagtccaaaaagaaaccatcatagaagcaacatgagcgcttagatcgtttctggcaacaaatgatgaacactaacatgcaaacactcagacgtggcaaaggcggcgcaccacagaagaatcaaaacgctgtgactcacggctttttctctaaattcctgccagaagaaacgcttgagatcatggaagagattcaggagcgttcgcctgctgatatgatatgggatcagatacagattcagtatgcagctattatccgggcgcaaaagatcatgttcgtttctgataaggaagaaatgatcaaagagctgaaaaagaaaaggtccctcatatctgaggtcagcgaaattgaagatgggcttgtcatttgttttagtacgtggtttcgctacagactttacagtgaaactataccaaacatatttcacaaacttgataaaataacttttaaaccttcctataaaatgaaggttttttatttgatttcaatttttaaatcctttacatacagcgattgattaactcgagcaatcaatgtcgcagttatatttatttttcaagaaaatgttataatgaaaagccataaaatgataggagggggaatttcgatgcattacataacggcatgtttaaaaatcatcagtgataaagaccttaatgagataatgaaggaattcaaaaaacttgaggaagaaacgaacaaagaagagggttgtattacattccatgcttatccgcttgagccatcagaacgtaaaataatgctttgggagatttgggaaaacgaagaagctgtgaaaacccatttcacgaaaaaacacacaatagacgttcaaaaacaagaattaacggaagtagaatggttaatgaaaagcaatgtgaatgattgaaaggctctttaaaaaaaagacattcaatgacttagaatcagccacttgtgattaagtagtaaattgttgtccaactcttatttttttctatttaatattttttgagacgaaaatgttttttaaagctgattttaaaatgtattcaaagtcagctctgtttgatttaatggattatattctttggataacttgttaccatcataatggagatactccgtataaattggaggttaaaataatgagtcattctcaagaaaaaattgcactaattacaggagcaagcagtcaaggggatattggtacggctatttgtcgtaagttagcctcacagggtatacatatcttctttactcactggaattctgatgcggcctggatagaagaatttcaacaagaaattttacgtatgggtgtccgctgtgaggcaatgaaaattgatttatcagatgcacatgctgcattcacaatacatgaaaaaatttcagataaattaggatatccttccatccttattaataatgcagctcattccgcaagtgataattatgtatcgttagatgctaaatcacttgatgagcattatgcggttaatatgagatcgaattttcttctttgtgttgaattcgcccgtcggtttaaaaaatctaatttaatatcaggaagaatcatcaatatgacatcagggcaggatttaggtcctttgcctggagagttagcgtatgcagcaactaaaggagctatttctgcatttactaggtcgttatcacaagaacttgcaccattgggcatcactgttaacgccgtaaacccaggtccaacagattctacatggatgacagatgaaataagaaattttctttcacctaaatttccaatggggcgtattggcacaccagatgatgcagcacgaatgattgcttttcttgcaagtgatgaggctgaatggataactggacaaattattcattcagaaggtggatttattcggggctaagctactgaaacacaatatacaccaatgtatgatgtattcccaaaactaaatctaaacttgaagcgaaaataaggtcccttctctttttagagggggaccttattttattcatgcatgttttgcatccagaaaatctggcggataaagattaataaaccgttacatatacttttccgaatactgcagtacctttaaacaaagtaatcgtggcttttccttttgatttagccgtcactaaaccattttgatcgacttcagcaactttttggttatcagtccaataacgagtagctgaattatttttaacagaataggtttctccaacttttagaggtaaatcatagtcttgaattttgataacatgtgtaggtgaaatagaaatgttctttacctcagtaggtgtggagtttatttcatgagctgaagctaccccgctgaccgacagagctaacgcagaaatcgataaagcagaaacaacagtttttttgaaattcattttgaaacactcctttaaagttttttgtcttgcactataacaattcaataaaagtaattattttccttgtaaataaatgttaataatatgtgaacgatcaatttatttgagctaagaatattgtgtgccctgcacagagtttgtatttatgatggaaaattgctgagagagaatggccatccttaaaatgttaatagcacacatttgatgggtactagtttgttgagcgtgtgggaattttgttacctgcactttatccccgaagataccaaatcatttttcttcatcatgttcttactttcgtactcatacattagaaaatcttcgttctaaataggtgaagaacattggagtatttttatgaatttctgctgaataacgataaaaaatacattacatagcaaactcaaagaatataaaaatcgcttttttccggatgtttcggtaaaaaacgaaacttttgtctctatgattttattttataatgtaaacggtttcttatatagtatacttatactatcaatttgctcaagtagatactgacaggaaggatagaaaaacagatggaatacataaatacaagacaaaaagagattttgtatctgttgttatctgaacctgatgactatttagttgtgcaagatttcgcagatagggtacagtgttctgaaaaaacaatccggaatgatttgaaagtgattgaggattatctcaatgagcattctcatgcacagcttattcgaaaaccagggttgggcgtttatttacatatagaagaacaggaaaggacctggctaagccaacaattacatactgaacatttttcttctaggcagcggagcgatgaagaaagaatgctgcacattgcttatgacttattaatgaatccgaagcctgtttccgcaaaagacattgccgctcggcattttgtcaatcgatcttccattaaaaaggatttatacgcagtagaagagtggctgaagcgttttgatctcacactggtttctaggcagcggcttggattaaaggttgaagggaacgaaagaaataaaagaaaggcattggcaagaatatctgatttgatccacaatacagcgtttaccagccaatttattaaaagtaagtttttacattatgaagtagactttgtgacgaaagaaatcaaatcattgcaaaaaaagcattccctctatttcacagacgaaacgtttgaaagtttgctgctgcatacattgttaatggtccgccgcatcaaaatgaagcagccgatttcattgtccccaaaagaaatggcggcagtaaaaaagaagaaagaatatcaatggacatttgcttgtttacaacggctcgaaccggtttttgcaatccgctttcctgaagaagaagccgtgtacttaacattacatatattgggcggtaaagttcgttatccattgcaaacagaagagaaccttgaaaatgctgtgcttcctaaggttgtagggcatttaatcaatcgtgtttcagagctgaaaatgatggattttcataaggatcaggatttgatcaatggtttgaacattcatctcaatactgtgctacaacggctgagctacgatctttctgtagcaaatcctatgctcaatgacatcaaaaagatgtacccttatttgttccaccttatcattgatgttttggaagatatcaatcaaacttttgatcttcttattcctgaggaagaggcagcatatttgacattgcattttcaggcagcgatcgaacggatgcagggcagcagcgagacacataaaaaggcgattatcgtctgccacatggggattgggatgtcacaattgctgcggacaaaaattgaacggaaatatcaccaaatcgctgtaatggcttgtattgcaaaggccgatttaaaggattatatcaaaaagcatgaggatattgatcttgtcatatccaccattgcgctggagaatataacggttccccatattgttgtgtctccgcttttagagcctggcgaagagaagaaattaagtgcgtttatatgtcagctgggcgaatcacaccgccaaaaacaaaaaacgtttcagatgctgaacaatacgactccttttttggtttttttgcagcaggaggcagagcaccgctacaagttaatcgaacagctggcgacagctttgtttgagaaaggctatgttgataaggactatgcggttcatgcggtgatgagggaaaaaatgtcggcgacaaatattgggtcaggcattgccattcctcatgcaaacgctaaatttattaaacaatcagcaatcgcgattgccacattaaaggagccgcttgaatggggaaatgaaaaagtttcgctcgtttttatgctggctgtcaaacacgaggatcaaaccatgacaaagcagctgtttagcgagctttcatatcttagcgagcagccggccttcgtccagaagctgacgaaagaagccaatgtcatgacatttttatctcatttggattattaaaagcagggattattccttgcttttttttgttatagggaaaaatgcctttattaccggaacctatggtaaaaaaaagcgattttaatgagctgatttcggtatacagttgagacaagatcttataattcacactttaaaggagggttcctatgaaactgttagcgattacatcttgtccgaatggaatcgcccatacatatatggcagcggaaaatctgcaaaaagctgctgacagactgggcgttagcatcaaagttgagacccagggagggattggtgtcgaaaataagctaaccgaagaggaaattcgcgaagcggaagcaatcattattgctgcagaccgttcggtaaacaaagaccggtttataggcaaaaaactgctgtctgtgggggtacaggacggtatccgcaaaccggaagaattgattcaaaaagctcttaacggggatataccggtctatcgttccgctacaaaatcggaatccggtaatcatcaggagaagaaacaaaatccaatttaccgtcatttaatgaacggcgtttcatttatggttcctttcattgttgtcggcggattattgatagcggttgcattaacgcttggaggggagaaaacacctaaaggcttagttattccggatgattccttctggaaaacgattgaacagatcggcagtgcttcattttcatttatgattccgattttagccggctatatcgcctatagcatcgctgataaaccggggcttgtgccaggtatgatcggcggttatattgcggcgactggaagtttttatgacagcgcaagcggcgccggattcctcggggggattattgccgggtttttggccggatacgctgcactttggatcaaaaaattaaaagttccaaaagccatccagccgattatgccgattattattattccggtgtttgcatcactgattgtaggtttagcgtttgtatttttgataggcgcgcctgtagctcaaattttcgcctctttaacagtttggctggcggggatgaaagggtcgagctcgatccttctggcattgattttaggggcgatgatctcatttgatatgggcggtcctgtaaataaggtggcgtttctgtttggatcggcaatgattggagaaggaaattatgaaattatgggaccaattgctgtcgccatttgtatccccccgattggtcttggcattgcgacgtttttaggaaaaagaaaattcgaggcatctcaaagagaaatggggaaagcggcatttacgatgggtctcttcggcattactgaaggagcgattccatttgcggcgcaggaccctctgcgcgttattccaagtattatggcaggctcaatgacaggttctgtgatagccatgattggcaatgtgggagacagagtggcgcacggcggacctatcgttgcagtgcttggcgcagttgatcatgtcttgatgttttttattgctgtgattgcagggtctcttgtcactgctctgttcgtcaatgtactaaaaaaggatattacggcgtctcctgtgctcagtgaaactgcaccgacctccgcgccaagtgaagctgcggcagcaaatgaaataaagcagccaattcaaagccaaaaagctgagatgtcggaatttaaaaaactgacagacattatcagcccggaattaattgaaccaaatttatctggggaaacgagggatgacatcatagatgaattgattcagaaattgtcccgaagaggtgcgctgctttcagagagcgggtttaaacaagccattttgaatcgtgaacaacagggaacaacggcgattggcatgaatatcgcgattccgcacggaaagtctgaggcggtcagggagccgagtgttgcctttgggatcaaacgatcaggcgttgattggaatagcctggatggatcagaagctaaattaatctttatgattgctgtaccgaaagagagcgggggaaaccagcatctcaaaatactgcagatgctatctcgaaagctaatggatgacaattatagggagcggctgctctccgtgcaaacaacagaagaagcatacaagctgctagaagaaatcgaataaagcgggggattttcatgacgactgaaccgttatttttcaagcctgttttcaaagaaagaatttggggcgggaccgctttagctgattttggctataccattccgtcacaacgaacaggggagtgctgggcttttgccgcgcatcaaaatggtcaaagcgttgttcaaaacggaatgtataaggggttcacgctcagcgaattatgggaacatcacagacatttattcggacagcttgaaggggaccgtttccctctgcttacaaaaatattagatgctgaccaggacttatctgttcaggtgcatccgaatgatgaatatgccaacatacatgaaaacggtgagcttggaaaaacagaatgctggtacattattgattgccaaaaagatgccgagattatttatggccacaatgcaacaacaaaggaagaactaactaccatgatagagcgtggagaatgggatgagctcttgcgccgtgtaaaggtaaagccgggggattttttctatgtgccaagcggtactgttcatgcgattggaaaaggaattcttgctttggagacgcagcagaactcagacacaacctacagattatatgattatgaccgaaaagatgcagaaggcaagctgcgcgagcttcatctgaaaaagagcatcgaagtgatagaggtcccgtctattccagaacggcatacagttcaccatgaacaaattgaggatttgcttacaacgacattggttgaatgcgcttacttttcggtggggaaatggaacttatcaggatcagcaagcttaaagcagcaaaaaccattccttcttatcagtgtgattgaaggggagggccgtatgatctctggtgagtatgtctatcctttcaaaaaaggagatcatatgttgctgccttacggtcttggagaatttaaactcgaaggatatgcagaatgtatcgtctcccatctgtaacatagcagggcttgagaaataaatttgcgagtgaagacgcctattctgcagcaatgatctaaataaaataagagtttaatagttggagaagaaatgttacactcttttctgtatatggtaaagaatgaaaaaacacgattcggttggtagtccggatgcatgattgagaatgtcagtaaccttcccctcctcgggatgtccatcattctttaatatcttttatgaggagggaatcgttatgaaattaacgatttactacgatgatcagttttgggtaggcgttgttgaagttgtggacaatggaaagctaagagcctttcggcatctttttggcaaagagccgagggattctgaagtattagagtttgttcataaccaactcctgaatatgttggcccaagctgagcaggaaggagttcgtttacaaggcagacgtcaaaaaaagatcaatccaaaaagattgcagcgccaggtttcaaaagagttgaaaaacgccggagtagcttctaaagctcaagaggcgataaagctagagcttgaagcaagaaagcaaaagaaaaaacaaataatgaaagaacaacgagaacatgtaaaagagcaaaggtatatgctcaaaaagcaaaaagcgaaaaagaagcacagaggtaaataatccaaacaaaagcaggcgcagtgcctgcttttgtaattaaggactctactttgtaacatatatccaatgtttatactccgctgatttatgattcaatataaaccctaacttctccaaggttttttgtgagcctagattatcatgttcgcatcttgcggtgatccgggatactgtttctcggcttaatgcccagtttattagtttttgggcggcttccacacaataacctttgcggcgatgacttttatttgttgcaaaaccgatttcaatcatgccattttcgtctgggtcacctaaaaatccagttcctccaacaatttcatgactgtccttctttacaataatccatgaatcaaatccttttgttccattgtttttgactaaaatctcgcggaaataaggtatcgcttcaaaaaaatcagaatttggccattcaccatttgtttcataacctaagtctttgatagcctgatgatcttgtttagacgcggcgtcaagaaggggaatatcaatcgtttttaatcgtaatcgattcgtttcaaggagaaccatatatctaatcctcttttctttttactgggaataatgataacatataacaattttctctgataccttggcagtagagaaagatggaaaaattgagggggattgaaagagtgacaggggagagtttgcccagaccaaaaacgggtaggaaaatgctgatgttaatgtgtccctacccgtttttctgttcctgaatgcagggtttctgataacatgttgtgctaccttttcgcaatcaaataaagcgatatggctctttgggtttgaacaggattatgaatgataatgacccattggtttcttcgtcttggaaagcttgctaccgcatacaatggagcagtatcgcgcggagtgaacccaccatttatcacgttgatatctcttccttcaagatgacaaactaagtattcacctggattgatgacctgttggttcgtccatgcgtaagaataaaagccgtctccaagatcttcggtggaagatggggggacaaagccatctacagtcaatgtgatttctcttcttcgctgtctttctgaaaaatctggacttctttgagggttatgagtatgtgaaaagtaaggaattaacgcagggccataaaagtaatgatacaaagcaaccactcctttattttccattcatacaaattgtatgtgggagttatttgttcattcctgttttgttccatgtagactaataatgggctataggcgtccaaggaaatcaatttgtcctttcgttgattcaatgctagtaaccttgaaaatgcaggttaggatgatagaatttacttattactgcaagaagttagatatacatcattttgatagtgggtgaaaacaatggcgaaaaaaatggcaaaaacaaatgcggttcgtctgatagaacagcagaacatctcttatgaggtattagggtataaaacagacggccagccggtagatggcatctctgttgcggaaaaaatcggttatcctttgaaatatgtatataaaacgttggttgcagcaacaggaacaaatcattattatgtctttgttgtacccgttgcagaagagttagatgtaaaaaaggcagcaaaggtgacaggggaaaagaaaatagaaatgattgcaatgaaggagctgttagcggtaactggctatcttcgcggcggctgctcgccaattggcatgaaaaaattgttcccgacctatattgatgcatctgcagaaatgcttgattttattattgtcagtgcagggaaaatcggtatgcagctaaagttggcgccacaagatttagccagatcatgtgatgccgcatttgcagaaattgtatagatgcagatataggggaacgaaaaagcttagtcatatcgactaagctttttccgcatccctttcaaatatgatttcaaaataagcagctgccccatacccatctatactgggagcgaaaatctgaacgaatctccagcctcttttcgcataatcatggatgatttgctggtagtcttctttaggccttcttctcatcgtactcagctcaactcttacgaattcatattctttcatcgtttgatccctcctattaaggtatacgtaaaatggagcgagaagttccgaaaagcctcactaaacacagaaacatcttgaagagttaaggggctataaaaacgaatttcaccgggtcagcagtccaaatgaatctcttgcttattgcatttgactgagtatataagtaaaaaaagagcggtcagaacatataagaaggagatgatcattaacgcactcataacagggtagtgtttagcggagtagatgaaaaaatcaagctgtgaaatttgtttggggctgctgacggcatcaattccatttagcagttttgagagtttagcagtatagttccaatcaaatcgatctgaaacaagctcgcttccttgataccaattaacagcagctaaaaacagaaataccataatagaaaatccaagctgaacaactaaaaatattcccttcacttttgtatgacctccaaatctatgaatatgggaaaatcaaacaatatattaccaccgtatgggttattcttgcaatttcactttcatacaactcaaacgcaagtctatttttttgtttgtttttggcttataatacctgatgatggaaaaagagtgcgggtttatagattagagaaacaaatgtatttcttagcattttttatttgtggagagagtatagaagcattcgattagatctgctttttcacagaaacgcttttcatctgtttgcctgagctttacaattctggcaaaaaaacaatgatttctttcaatcaaaacatgcaacgatgcgacatattttatatcttgatgacttatctcattgcctttaagtcattctatcgagaaagtgatggtattttatgaacaaagaaaccctaaaaaacatactcatgattttttcaatatgcgcaaccctccgagaaaccgatggtatgcgcatagctgatagctggattttgagtgagattatacgatttttgatttgcatggctgtgttttttgccatgacatttctattagatgctgtttttccaaacaaaaaagagtcacattaatgtgtggctctttttgcatcatctgatcagaaacatcataaatgaatcgatcatcatgatgaagaacagcaagcaaaaataaataagcgagtagacaaacatatcctttgcccacttcacgtcatcgtctgttttgaatcctttgatgctttttttgatccatatgcctccgagaaccaaggcggctaagaaataaaatgggcttatatggccggtgcctagagagaaaggaaataatagcgtgaccggcaccaggacggcaatatattgcatcatttttatttttgttacatgattgcctttgactactggcaagagcggaacgccagcagcgcgatattcctctttgcgtcttatcccaatcgcccaaaaatgcggcggctgccacagaaacataatcgtgtacaacagcactgctgtcatactgaagtcaccggttacggcacaataccccatcaatggcggcgcagctcctgggaagctcccgacaaatgtgctccacacagacgttcgtttcacccataccgtatagatgatcgcataaaaaataaaggcggccagtccgagataggccgttaatggattgagggaataaagcatggcaaggcctgcgatccctaaaacagagccatatgttaagatcatggctggcggcattttccctgtgaccgaggccctgctgcgagtgcgtgccatttttgcgtccatatgccgatcaaaatagttgttatagacagtgccggaagccatcacaaacgcggttcccaacattgctgttaccattgtcatcaaaaaagccaagccggttaacgttttttctgcgcttgcaaacgcgatccaaaacccgccgaaggctgctatcgagtttgatatgataatgcccggctttgcaagtttgataaaatcgtaaatggttacccggttcgaagcttttatgtattttgtttcagatatggctgcagaatctcttgtattctccaaaaatagacgcctcccccaaaactgcatgcttttgttatcgtaacaagagggggacagaatcacaattatttcctatatttgtcatgatattgtcatttttaaaacaaaaaaatggggagctggactgcccccattttgatatgcggcgactagtaaccgtaacctccgccatatcctccgccataaccgccgccgtaaccgtgccaagggtagtaaggcggtcgcgggcgcgggtagtaataaggcgggcgcggataaaacgggtagaacggataatacggtcttggataataataaggcggataaaatggcggtctcggacgcggataataataaggctgtctttcatcataaggggtaatttgttcaaatgactgttcattcaaagggtaatccaagaggaaaacctccctagctttttttattccttttaccatattcctgatgcttaagttgggtgtatgtacattcatgaaattcggttttttttatgatgaaattccttaaaaaggattgacatgaacttctaaatctcatagtattacaaatgtgaaataaatgttactacaatgttacaaaaacatttctaaatagatacagttccaactgatgaagagtaaatcgaaatggctacgaaagaaggagtttttgttgttggcaaaaagaatcaaatggtttcatgtattaatagcagttgtatgtgtggtgggccttatcggctttttccataatcattcattgaaaaaagaaacggtcatgaataaagtaagaactgattctcaatatgggaatgttgagatcgcaacgcttgtgaatgacgggaaaacttttaattacgcggttaactatcccgttttcaaaaatgaaaaaatggattcggcattaaaaagattcgcagaaaaagaggttcgtcaatttcaaaaggaaacaaaagacgttgaccaagagcatacgacaaaacgcaacgaattaaatgttgattataaaattgtccattatgccaaacagacagtggcgattgtatttaatgaatataaatacatcggcggggcacacgggcaaaccgtgaaaaaaacgtttaactatgattttagtaaacaagcgtttctttccattgatgatattttcaaagaggacgctgactacttacataagctttcgttaatcgcttatcacgagctgaaaaagaataaggacattgccgcggacgatgcactgttaaaggaagggacggctccgaaaaaagaaaatttcagccgctttgccatcaaggaggattatatcgaactttactttgacacatatcaggttgcagcaggctatcttggagagcaatcgattgccattaagaaaagtcttttgaaagacattctgaaagaacaatatattgataaagcaaaaaataaaaataaaatcaaagaacaaaagccgaagcatgaagtgatttctttacccaaagaggaaacggttgatccaaatcaaaaagtcattgcgcttactttcgacgacggcccgaatcctgcgacaacaaatcagattctagactccttgaagaaatataagggtcatgccacgttttttgttttggggagcagggttcaatattatccggaaacgctaataagaatgctgaaagaaggaaatgaggtggggaaccattcatggagccatccgcttctcacaaggctttcagtgaaagaagcgttaaagcagatcaatgatacgcaagacatcattgaaaaaataagcggataccgtccgacgcttgtaagacccccatacggcggcattaatgatgaactgcggagtcaaatgaaaatggatgttgcgttatgggatgttgacccggaagattggaaagaccgtaacaaaaaaacaattgttgaccgtgtcatgaatcaggcgggagatggaagaaccattttgattcacgatatttaccgcacctctgctgatgcggccgatgaaattatgaaaaagctcaccgatcaaggctatcaattggtgacagtttctcagcttgaagaggttaaaaaacaaagagaagcgaaataaattaaaaaaggctgtccgtacggacagccttttttctatttaataagagcctgtggtggcccaaacatttaagtttggtcctgaatacttgccaaaagcgtaagaagtccttggatctaaatcatataccatcggtgtatagcaagacttttggccggccaccgcttttccattgccgcctgcagaatcacaattatatctctttccgtccgtgtttcgggtaatctccgcatttgcttcaaagccagacgtcaatgtattattcatcgtgatttttgcccaagccgttttacatgtactgctgaatttaagctcgactactccgatgacttgattgctggcattcactaagtttgaggatttttttgtagagccgctggacgcacaatcattgtaataagggctttttccatcgtaggcatgggtttccgcattggcgggtacacctttgacggcaaaaacaaatactactgcaaataacaccaatgaagccttcgtaaacagtcttttcatatcctttatgacctccttaatatggcaaacaataaatcatacggaggaacaatcaaaacatgcatgcttttttgtgaacaataaaggcggccgggaggatggagttcttggccgcctttgatgtgaggttaaacttttacatcaatggtttgtccgagagtcggatgctgaatcatctttaaggtttgatcggcattttgctgggcggtatccagcatttttttcgttaaagcgatattaacattctgggcaagggatgcttgatgcattgcaaccgataaagcaggaatatccatcgttccacctcctatgccttacctatcggcggctttgtatcattttacagtgaaaaatggcttaattttcgctgttgacccctacgctgcggcatatcgtatgtttttgacaaggagggaatcaggatgaatcttgtcatggaaaagacctttgagcaatacgaaaagctgttttcaatggaagaacagaaaagagaagatgaatttcggtatacgatgatgaggccgtttgaaaagatgtggaccgccatccatgttccgctgaaagcgaaggagccaaacggctatgatgtgatcatggctgcgaaaatgcttggctatttggatgtccgtgatgttgaaatcggacagaaagcactgcgaatactgaaagaatcacatgtttcagagactgcggaatctgcacttcggcaatgcatattttttgatgagcgcgaacagctgcgggtgaatgcaaaggagatcaaattcggcctttatatcgctgatccaaataagcttcagctgcaaaaaggctactgcgggtttggcgggataccgggctttattcatgtatggattgatccgaaccgttataacctgccaaggattccttccattattgctcatgagtttcatcataatttgcggttttcgtatatagattttcatcatggctctgtaagtgtcggggattatcttgtgattgaaggattggcggaatcattcgccagagagctgtttggtacggaacgattgggcccttgggtaactcgttttgatcatgaggatttgcaatattccattgatgtgattaatgaggtgttggatgtgaaaggattttcggaagtcagccgttatatgtttggtgatccaattgctaaagacaaaggatttgaacctgtaggtttatcggcttttgcgggttatgcagttggctatcatgccgttcagtcatttatgaatcaacatcatatcacgataagcgaggccacacgtttggatgcgaaggccattctttctcagtgcggattgttttccaaatgaaaaaaagcgtcacatacagcggcgctttttgattcccaaaaccagcagttctatggcggcacaggcggcaattccgattgtatatgcttcgatatcgctccataaaaaaccgtaccctagtacaagcccgccaagagaagtatctctaatctggtcgatccattcggcatgatagagctggctgaattcaatgacaaaacagaaagaaagactgataatgcccgttatcattgtcttcagcttccgaaatagaaatccgcatcccgtgaagatcatggcggcccacaacgagtctcccagataagtattgagggtatcaggaagaacactggagaatgctctggatccaagccccagcccaatgatcagtatggtgaaaactgcatatatccaacgatttcgcttcattgcgaattgataccccgtctctgcttcatctccctgtattgtaaggaatatagcttttatttgtccactaaaaaagcggctgaatagccgcgtagggtgtttattttgcttttaggtttacatggtcggctgtctgatccgtgcctattacaaaatggagttcatagcggcctgtatcatatacataatcgatttcatcggtaaacgggacggttaacacccgatttgctggtcctaattgcttctgcagcacttccggcgtaactccgcctaaattcagctgccgttccacaccggttccaaagtatcggatttctgaaattgtcatgtctttatgataggaaaatccgtagcccggctgtcccatattccagtgatataaatcaaatcgattgtctcccccgactggtctttccggttccccaaacgcagcgtggacatccccttttgtgcttttgttaatggtaaggccttgcgcctgctgaggcatttctcctttgtaggcggtgttgtaaaggtttttgacgagctcggaggctgattgggttgtattttcatagagtgtatttgtttgagctgcggcctttgccggtgctgaaaaggacgcagccccaaagccggtaaaacagcttgttactgctgctgccgcggttatagcagacattgtctttttcatgttaatccctcctaattgatctaccattccgtttccccgtgtttttgcaacgaaacatgtgagtgcgctttgtatgttttattgagttgttgtaagggaactgaaataggtaattcggtatataaagcaagaaaggggaatggagatgcctggcaagaaaaaaatcacaataaacggcgttgaaatggaagcgtccgaggaacagacggtgctgcagcttttgaataacagctcgattgaagtgccgcaagtttgctatcatccaagcttagggccgattgagacatgtgatacgtgcatcgtcagcatcaatggtgagctgaagaggtcgtgctccgctgaattaaaggatggggatatcattgatacgctctcacctgacgtgaaaaaagcgcaggtcatcgggatggacaagattttatataatcatgagctttattgtacagtttgcgattacaacaatgggggatgcgaaatacataatacggtgaaggaaatgaaaatcaatcaccaaagcattccgtttgatcacaagccataccataaggatgaatcccatccgttttatcggtatgatccagatcaatgtattttgtgcggacgctgtgttgaggcatgccaggacgttcaggtaactgaaacgctgaccattgactgggagcggaaacgcccgcgcgtcatttgggataacgacgtgccgatcaatgagtcgtcatgtgtgtcatgcggccattgttcaacggtctgtccgtgcaacgcgatgatggaaaaaggaatggaaggggaagccggatatttaacaggcatcaataacgaaacgctgcgaccgatgattgagatcacgaaaggcgtagagacaggctacggctcgattctcgccatttctgatatggaatcggccatgcgtgatgaacgaatcaaaaaaacgaaaaccgtctgcacgtattgcggcgtcggctgcagctttgatgtctggacaaagggcagagacattctgaaagtagagccgcaggaggaagcgccagccaacggcatttctacttgtgtgaaaggcaagttcggctgggatttcgtcaacagcgaagaacgcctgacaaagccgctgatccgggaaggcgatcatttccgtgaagcagagtgggaggaggtgttatcgctgatcgccagcaagttcactgaattaaaagaggcgtttggcccggattctctcgcttttattacatcttctaaatgtacaaatgaagaatcctatcttatgcaaaagctggccagaggggtcattggcacaaataatgtggacaactgctcccgctattgccaatctcctgcgactgccggcctgttccggacagtcggctatggcggtgattcaggatcaattacagatatcgcgcaagcggaccttgttttgattatcggttcgaacacgtctgagtcgcatccagtcttatccactcgcattaaacgggctcataagctgagagggcagaaagtgatcgtcgcggatatcagaaaacacgaaatggcagaacgctccgatttatttgtccagccgcgtgccggatcggatatcgtctggctgaatgcgatcgccaaatatttaatagaaaacggcaaggccgatgaacgatttttgagagaaagagtgaacggacggcatgaatatgtaaaaagcctcgcgccgtacacacttgaatatgctgaggagaaaaccgggattgatcaagaaacccttatccaaatggcagagatgatcgggcaagctgacagtgtgtgcgcattgtgggcgatgggcgtgacacagcatattggaggaagcgacacgagcacggcgatctctaatctgctgcttgtgacaggaaactacggaaaaccgggagcaggttcttacccattgcgcggccataacaacgtgcagggagcaagtgactttgggagtatgcctgacagactaccgggctatgaaaaagtgacggacgaacaagtccgccaaaaatacgagcgggcatggggcgtaccgctgccgaaggagccgggtatgaccaaccacgaaatgattgaaaaaatccattccggacagttgaaagcgatgtatgtaaaaggtgaagaaatgggccttgtcgactccaatatcaatcatgtacacgctgcatatgaaaagcttgatttctttgtggtgcaggacattttcctttcacgtacagcggagtttgctgatgtggttcttcctgcgagcccaagccttgaaaaagaaggaacgtttacaaacacagaacgccggattcagcgtttgtatcaggtatttgaaccgctgggtgaatcaaagccggattggcagattattatggaggttgccaataagcttggcgccgactggctctatgagcatcctgcagacattatggaggaagcagccaagctgtcgccgatttatgccggtgtcacctatgaacgtcttgagggctataattccctgcaatggcctgtaaacgctgatggaaaggattcgcctttactctttacagagcgcttccctttcccggacggcaaggccattctctaccctgtccagtggacagagcctaaggaattcggtgaggaatatgatatccatgtcaacaatgggcggctcttggagcacttccacgaagggaacctgacttacaaatcaaaagggatttcggagaaaacaccggaagtgttcttagaaatttctcctgagcttgcggcagaacgagggattcaggacggaaccctcgtcagactcacatcgcctttcggaaatgtcaaagtgaagtgcctgattactgatcgagtcaaagggaaggaagtatatctgccaatgaacgattcaggggaagcggcgatcaacctgttaacaggcagccatgccgataaggataccgatacgcctgcttacaaagaaacatcggccaagatggaaattttgaagcacgacggaatcagcccgctgcctaagatcaaccaccgcaacggcaatccgcagccgcaaatcggtgtgcaggttcataagaaatgggcgcggaaggattatattttccctggtgacgctgtgaaaagggggatgggccataatggctaaagcgattaaacgaatccaaaaaatcgaggtaacagaagaggatcagcgaaagcgtgatttgcgggaaattgaagatgctctaattgaccacaaagaagcgattctcgaaacattgcatatgctgggccatatgaacgagcgcggtgtcctgccgttgctccgcggcctttttggccaaggggataaagttcttgatatcctggtgaaaaaggcagatacagaggaaacagccaatacgctgaaaaatctgcttcttctgtttggaacactcggcatgctggacgtgaagcagctggagcctctcattttgaaagtgaatgcgggtgtggcaagcgctgtagagcagaaaaacagtgaagaaaagacaggttattttgatattatccgctcgctaaaagacccggaaatcaacaaatcaattacactgctcttttcctttttaaaaggaatgggacaagatacaaaggagctggaacgcacgacgcagcctccggaacaccaaaaacatcatcaggaacctcgagagaaaagaggaatgaataagcgagattgacctcccacccgagcggcttcagccagctcgggttttttgatgaaaaggtctaatggactagtaaaaaatattcaaatactaggaagaagtaagattgtgatgaatgagatagaaataatcgttactttcttacctgttaagaaaaggaaaaatctgattataatagaaatcgattactttagatgggggaacaatcatgaaaaaagtcttattactattatttgtcttgacgatcgggttagcgctttctgcgtgcagccaatcgagcgatgcgtcagagaaggaaaaaccgaaagagaaaaaatcgcaagaagagcttgaaaaggaacttgataaggaattgaaaaaaggcggtgagccgaagaccaaaaaagatgatcaaatacataaaataggagaaacatttaaagcaggacatacgaattttacagtgaataaagttgatagagtgcaaaaaggtgaatatatgaatgttggcggagctgtaaatgaggagacaaaaacaataaaagatgatgaggaacggcttattatagaagttacgatggaaaatataggggaagattcaataagctacaattttatcgggtttgatttaagagataagaatgatcaatcagtgcggcctgttttttctatagaagagaagggcagaatccttatgggaggaacactagtatcggggaaaaaggttacaggtgtactcagttatgtcatccctaaaggagaacagaaacattacacactggtatataatccgtttttagctgatacaaatagcagtaatacagaagagagagtaaaggacgatattgattacttggtgaagttagattagaagctaatttacagttgcacgtttttcatctgtggaaaacgtgcattttttatagcgaaacttgacttgaaaggatgagtgataaaagtgcaaaccaaatggctggaacgggcacagcgaattcgggcgatcgcacaggctgggcttgctttttccaaggatgtgtacgacagggagaggtacgaagagctaatgaagcttagcacggaaatgatggcggattactcggagaaggacattgaagttatcactgatttatggcaaggcgagaagggctatccgacaccgaaagcggatgttcgcggcgcagtattccgagagaatcagattttgcttgtccgggagaagcatgatgagctgtggtcgctgccgggtggattttgcgagattggtttatcgccagctgaaaacgtcgtcaaggagatcaaagaagagtcggggtacgatacagagccgtctcgattgctggccgtgctagacagccataaacactctcatccccctcagccttatcactattataaaatcttcatcgcatgcagcatgacgggcgggcagggggaaacaggggtcgagacgaatcatgccgctttttttccggaagacagactcccgccgctctctcctaaacgaaacacaccctcacagcttagcatgctgtttgactttttgcgccatccggacaagaaaacgatatttgactaaaaaagaaagagcctatgggctctttcttttttataatgtaatgtgtttttcgttggcgagtttcagaagggtcaaaatagaatcggcttgtttatggccgagtttttgctttaatttgttttcttcaactaatcggctgccataaattttgacagaggctttgtcgacgacagtatgccagttttcctgtttttttccctcaacaagcggtttttcatgtctctcagaaaaagagaacacaaacagtacgaatgcaagtgaaagtaggatgccgacaacttgttttttgtaatcagtctgtgctgccacgttgttctctccttcaccttttaccttctatttaatcatagaatcagcttattttacataatgggaaagtcatttttggagttagtgcatttggttgaaaacagaggcgttttttgagcggagcggtgcaattgaatctatattggctttgcgtgcttatgcctaaggtcacgttgtgaaccaaaacagcagtgcagaatagaaaaaaattgaaagattatggtaagatgaacgaaattcgagggggaatatatgatgcctgcatcaaacatcgtgatcgcctgcctgctgttatcaatttaattatttgtggtagtccctctctttttcgaaagcgggaggtgaagtggaacattaattgctgaattctttcaaggggagtgaccgtacatgaatgtgttaaaccgccggcaagccttgcagcgagcgctgctcaatgggaaaaacaaacaggatgcgtatcatccgtttccatggtacgaatcgatgagaaaggatgcgcctgtttcctttgatgaagaaaatcaagtgtggagcgtttttctttatgatgatgtcaaaaaagttgttggggataaagagctgttttccagttacatgccgcagcagacaagctctattggaaattccatcattaacatggacccgccgaagcatacaaaaatccgttcagtcgtgaataaagcctttactccgcgcgtgatgaagcaatgggaaccgagaattcaagaaatcacagatgaactgattcaaaaatgtcaggggcgcagtgagtttgaccttgttcacgatttttcatacccgcttccggttattgtgatatctgagctgctaggagtgccttcagcgcatatggatcagtttaaagcatggtctgatcttctggtcagtacaccgaaggataaaagtgaagaagctgaaaaagcctttttggaagaacgagataagtgtgaggaagaactggctgcgttttttgccggcatcatagaagaaaagcgaaacaaaccggcacaggatattatttctattttagtgaaagcggaagaaacaggcgagaagctgtccggtgaagagctgattccgttttgcacgctgctgctggtggccggaaatgaaaccactacaaacctgatttcaaatgcgatgtacagcatattagaaacgccaggcgtttacgaggaactgcgcagccatcctgaactgatgcctcaggcagtcgaggaagccttacgtttcagagcgcccgccccggttttgagacgcattgccaagcgggatacggaaatcggggggcacctgattaaagaaggtgatatggttttggcgtttgtggcatcggcaaatcgtgatgaagtgaagtttgacaggccgcacatgtttgatatccgccgccatcccaatccgcatattgcgtttggccatggcatccatttttgccttggggctccgcttgcccgtcttgaagcaaatatcgcgttaacgtctttgatttctgcttttcctcaaatggagtgcgtcagtatcactccgattgaaaacagtgtgatatacggattaaagagcttccgtgtgaaaatgtaatagataaggagactggagattcatgaaaaagtaccatatttcgatgatcaatatcccggcgtacggacatgtcaatcctacgcttgctttagtagagaagctttgtgagaaagggcaccgtgtcacgtacgcgacgactgaggagtttgcgcccgctgttcagcaagccggtggagaagcattgatctatcatacatccttgaatattgatcctaagcaaatcagggagatgatggaaaagaatgacgcgcccctcagccttttgaaagaatcactcagcattctgccgcagcttgaggagttatataagggtgatcagcctgatctgatcatctatgactttgttgcgctggctggtaaattgtttgctgaaaagcttaatgttccggtcattaagctctgttcgtcatatgcccaaaatgaatcctttcagttaggaaatgaagacatgctgaagaaaataaaagaagcagaggctgaatttaaagcctacttggagcaagagaagttgccggctgtttcatttgaacagttagctgtgccggaagcattaaatattgtctttatgccgaagtcttttcagattcagcatgagacgttcgatgaccgtttctgttttgtcggcccctctctcggagaacgaaaggaacaagaaggcctgttgattgacaaggatgatcgcccgcttatgctgatttctttgggtacggcgtttaacgcatggccggaattttacaagatgtgcatcaaggcatttcgggattcttcatggcaagtgatcatgtcggttgggaaaacgattgatccagaaagcttggaggatattcctgctaactttactattcgccaaagtgtgccgcagcttgaggtgttagagaaagctgatttgttcatctctcatagcgggatgaacagtacgatggaagcgatgaacgcaggtgtgccgcttgtcgtcattccgcaaatgtatgagcaagagctcactgcaaatcgggttgatgaattaggccttggcgtttatttgccgaaagaggaagtgactgtttccagcctgcaggaagcggttcaggctgtatccagtgatcaagagctgctcacccgcgtcaagaatatgcaaaaggatgtaaaagaagctggcggagcggagcgtgcggcagctgagattgaagcgtttatgaaaaaatccgctgtcccccagtaaaaacataaaaaccgaaatcaatttgatttcggttttctgtttaaatattttttttcatcccgcatctccggcattctctaagaaattttccgccttttacagagcttttgaacagtgtgtaatcacagttgtcgcagcgcccgctgcgggcgtccggatattcattgaattcgtaaacgatcgatgtatcgtagccttttgtttcatattcttctttttttgtttccatgtcgtccctccgttacaagacgtgtctgctgtttatcttacagcaagcttccggcgtattcaatggattttagaggtttgggtttatcttgatttctcccttggtttgcgccaaaatagctttaataagcttgtatacataaaaagcctatgcaaagaggagaggaaacgggtatgggaaaagggttacttggaaaacgtgtggcaatcggtggctcacgaaaaacggaagaaatcagtacaatcattgaaaaacagggcggaatacctgtcatccggcctctccaaggtacagtttacttagcagagaagcaggtggagccggatttgcggacgtttgcggaagaaaaagctgactgggtcattttcacgacaggcatcgggttggagactcttgtcgatatggcagagaaaattggactgaaagatgaatttctgcaggccattcgccaagcgaaagcggcatgccggggatacaaaacgctgtctgcgctgaaaaagcttgggatcacaccggaagcttcggatgaagacgggacaacaagaggcttaatccgttctttggagcctcacgacttttcaggaaaaacagtcatggtgcagcttcatggcgaaaaagcgccggctctcatggcatttcttgaagaaaaaggcgcgtctgtcctgccgattctgccttatcagcacatcccgccggaggaggaaacggtggagcggttatgccgagagctgatgaaccgtgagatcgatgccgtttgttttacaacggccattcaggttcgttccctgtttgattttgccaaggggcgaggttatatcaatgaagtgaagaaggtattcgaagaacgcgccatcgcagctgctgtcggaaaagtgactgctgaagcactgcgggaagagggcattacgagactgcttgcgccagagattgagcggatgggtgcgatgattgttgagctggccaagtattatgaagaaaaggaataacaagtacaaaaagccgcttttccctcggaaagcggcttttgtctgtcattcattctgcttcagctgctgatgaacggtgaataatgatgggtatgtcagcacgcttaagattacacaagtcagcgcggctgaggccatcgttgtaaacacgattaagagttgaaagcgtactgcctgaatcgggtccgcgccggctagaatctggcctgtcatcatgccgggaagctgaacaagacccagtgttttctggctttcgagcgtcgggatcatactcattttcatcgctgaagtaagaatgcgctgtatggattgcttcggtgtgccgccaagtgacaatattaattgaatttcttctttgcgaacgccgacttctgagttaagccggtttagaaacaaacttgagagcaccatcgaatttccgatgaccatcccgctgatcggaatgacatatcgtgccgtaagcggaatgatatgaagagacagcagaattccctgcgtcaccatttctacgattgctaacgcggcaaacaccctccaaaacgaaccgattgtatttttctttcgcttgatgacattttgcgccgccaccgcgagcattaacagcaccatcagcaggataaaaacagggtggtctccgcgaaaaatcagcgacaaaacataaccgatgataagcagctgcaccgcggaccggatggtggcgatgatcatgtctttttctaccccggctttaaaggattttgataaaaacaaggcgatcaaaacaaagatcatcgttaaagagagagaaaggtaatccattaccgagtgcctcccttcaaaaattctttcgctgcttcatgctgcggagcggagaaaaatgtttcggtttcggcgatttcaagcagccggccatctgccataaaccaaatggtatcggctactcgttttgcctgctccatattatgagtgacccacatgactgtccattttttctcttgatgctgacgtttgatcagttcttcaatctcaagagcagaaaccgggtccaaggccgacgtgatttcgtccaacaatagaatggaggaaggatttgagagcgttctggccagtgacagtctttgccgctgcccgcccgataagtctctggcgcttctgtctaacagctctggcggcagccctgcaagagaagccagcttttcaggagagtacagctgggattgatgcagcctttgtacaagacttaaattgtcacgcactgtcccgtcgagcacgggagccgattgaaacgcgagggctgccgttctcctcagctcattgacattccattctctgacttcctttccatatatgttgacttcgccgctgtcaggcgttctcattaaattacacatagaaaggagggtgcttttgcctgagccggaagggcctaaaacggctacgattgcaccctgttgaatgtctccggtgacatcctgcagcacatcataggtttgtccatcttgtttatagctttttctgactgatctgaaggagatggctggtatgttttgtgtttgatcgtttgcttccattacaataatcacctttcaatataagtaggctgacattatatttaactataacgtgaaacagattccttttggtagcacaaataaaggagaacaggctttcacccattctcctgcagatgctacgcagtcagatttgactgtgctttctttttcggttttctcggctgtgaagcgaaggtatgtaacatcatccccgctattataatgaacaaaccggcaaatgataatagagatgggaaaacgcctgacagcagaacaatttcaccaagcagcgcgaaaatcacttcaccggattgagtggcttcaacagctgcgagtttttgcggattgtctcttaccatatcagtagcccagaaaaataaaaccgtcgcaatgatgcctgagctgacggcaacgataaaggattgaacggtttgacttgctgttggaaggccatctgaccaccagccgtaagctgctaatataagccagaatggaaggcttgccaatgtcattccaagcacgcgctgaaatgtatcaagccggcctccgtattcttcgagcattctcctgtttcctaacggataggcaaaagccgcaatgacaaccggcagcacactgaaaagcagcatcctcccagaaagcgattctgcatgctgaagctgaatcagagccgctccaatcaggatgatcacggaagtgccaagtgaaaccaggggaatcttttggcgaacgagctgcggaccgcccggcatatcttgtttgacataaaacaaaggagataagagcaccccggctacaattgtaatttgccaggttccggctatgagccaccccggaccgtatgcagccgcaaatgtaatcggcgcgtaaaaaagcacgaaaccgacgaagctccatttgatccaataaaacggctttttcctcatctctagtaagagaggcgtgaatgtccctctcatgatgacaatcaaacataaaaatggcaccataaaaataaagcgcagcgaagagctccaaagccagctgcctcctgataactccatcgctctgtttaatataaaggtaacggcgaaaaagagtgaagccaatattccgataacgatagctttcatgatatccctcattctggcattatttttttatactatactattcggtatcatgcagatcaatggaatcatgagaaaaacatcatgtttggcgaactgctatgtgtggaagacaaaaaagggaggtgaaattgatggaaaaagagacacagacatacttctttccggatgacggcaggattccgaatcaccctgattttccgctcgtggtgtatcaaaacgcgcttaaggacactggactggcagagcggatcgtcatccggcatggctggtcaaacagctggtcagggagtgtttttccataccatcattatcacagcaatacgcatgaagtcctgattgcccttaggggagaggctgtgattcagtttgggggagaaaaaggggctgccatccctttcaaatcaggcgacgcagtcgtgattccagccggagtcggacataaaaagctcagctcaagccccgattttactgtccttggcgcctatcccggtggcattcagtatgatatgaagacgggaaagcccaatgagcgagaggaagcggtcaaacagattaagcaggcggcgttgccggcgaatgatccgatcacaggaaaaagagagcctctattggaaatatgggtaaagtgaaggggagaaattgctggattgtcaataactagtgccgcagaaacgatatgacatgtgctccatataaattaatttcataatcgaagcaattcacgttcaaattttgttcaaaaagtgttatcatatagaaggtaatcgaattggagttttttgtgtttgctattttcagagagagtaaaggattttgacttattcaattgtttatttttagataaaaataatactgaatatggcaagatgaaaaactgggtagtaaacatttatttttgtaaatgattgtgcacgaattcacaatccttattcttatgccttaaaagcgtgagacagggagaggcactaccctttccaaaaaaatcagcaaactgcttatagtaaaggagaattggatatgccagaaacaatcgatcaaacaaatgcgtctgtcagccaaagccagcaagatcttattgatcagctattaaagccagaagttcaagaatcattgactgttttagttgaccagcttccgaagctgactgagttagtcaatattttaacgaagtcttatgatttcgctcagtctgtagcgactgacgaagtgttaaaaaacgacacagtcggtgcgatcactgaaattcttgagcctgtaaaagaaacagcgaaagaagtagctgcgactgcgatcgaagcaaaagaccgcgcggaagcaagcaacgaaacaattggtcttttcggcctgctgcgtatgctgaaagatcctcaagctcaaaagttgttccgttttgctaacagctaccttgaagtcatgaacgaacgcgaaaaccaaaaataatctcagattcaaattgatataaaggacggaggatatacgatgtcaaaacatattgtcattctaggcgctggttatggcggagttctttctgctctaacagttcgcaaacattacacaaaagaacaagcacgcgtgacagtggtaaacaaatacccaactcaccaaatcattacggaattacaccgccttgctgcaggcaacgtgtctgaaaaagcggttgcaatgccattagaaaaacttttcaaaggcaaagacattgatcttaaaattgcggaagtaagctctttctctgttgataaaaaagaagttgcgcttgctgacggttctacattaacttacgatgcgcttgttgtaggtcttggttctgtaacggcttacttcggcatcccaggtcttgaagaaaacagcatggtattgaaatctgctgccgatgcgaacaaagtctttcaacatgttgaagatcgtgtgcgcgagtactctaaaacgaaaaacgaagcagatgcaacaatccttatcggcggcggcggcttaacaggtgttgagcttgttggtgagcttgctgacatcatgccgaaccttgcgaaaaaatacggcgtagaccataaagaaatcaaattaaaacttgttgaagcaggtccgaagatccttcctgttcttccggatgatcttatcgagcgtgcgactgcaagccttgaaaaacgcggcgttgagttcttaacaggtcttcctgttacaaatgtagaaggaaacgtaatcgatctgaaagacggatctaaagttgttgccaacacatttgtttggactggcggcgtacagggtaacccattagtcggtgaatcaggtctagaagtgaaccgcggacgcgcgactgtaaatgacttcctgcaatctacatctcatgaagatgtattcgttgctggagacagcgcagtttacttcggtccagacggccgtccatacccgccaactgcacaaatcgcatggcaaatgggtgagctgatcggttacaacctattcgcttacctggaaggcaaaacgcttgaaacattcaagccagtaaactctggtacacttgcaagccttggacgcaaagacgcggttgccatcattggtgctaattctacaccgcttaaaggtcttcctgcttccttgatgaaagaagcaagtaacgtacgttacttaacacacattaaaggacttttcagcctggcttactaatccttttaatgaatctgacattgccaaaagcgttccttaccgagtgctttctggcaatgtctttttttatgtttatgacagcgttaacatttcattttcaaaaaagagattgatcccagaggaatataaaggtaaaataaaaacaaatcaaaatgttaacgttaacattttgaaatagaatgaaagacggtgaggacatggaacccttcatgggcgaaacctttttattgaaaaatgaaaccgctgtcagcctctatcacaattatgcgaaagacatgccaattattgattaccactgccacttaagtccgaaagaaatctatgaaaataagacatttcaaaacatcacggaagcctggctgtatggtgaccattataaatggcgcatcatgagagccaatggaattgaggagacatacattaccggagatgcgcctgatgaggagaaatttatggcttgggcgaaaaccgtgccgatggcgattggcaacccgctctacaactggactcacttagaattgcagcgtttttttggcatttacgagattttaaacgagaagtccgggccggctatatggaaacggacaaatgaactgctcaaaggggaaggcttcggggcaagggatttaatcgtgaaatcaaatgtaaaggttgtgtgcaccacagatgaccctgttgattctcttgaataccatctattattaagagaagacaaagactttcctgtcagcgtgctgcctggatttcggccggataaagggcttgagatcaatcgtgaaggctttcctgagtgggtgcaggcgcttgaagatgccgccgccatatccattgcaacctatgatgagtttttaaaggcgttggaaaaacgagtgcgattcttccactcagccggcggcagagtttctgatcacgcgatagattcaatggtatttgccgaaacaacaaaagaagaagctggacggattttttctgacagattacaaggaacagaggtttcttatgaagatgagaagaaatttaagacatatacgcttcagtttctttgcggtttgtatgcggagctcgattgggcgatgcagtttcatatcaacgctttaagaaacacgaatacaaaaatgatgaaaaggcttggacctgatacaggctatgattcaatgaacgatgaagaaattgccaagcctttatacaagctgctgaactcagttgagatgaagaaccagctgccgaaaacgattttatattcactgaatccaaatgataactatgtcatcgccagcatgatcaacagttttcaggacggtattaccccgggaaaaatacaattcggcacagcctggtggtttaacgatactaaagacgggatgctcgatcaaatgaaagcgttatcaaatgttggccttttcagccgttttatcggcatgctcaccgattccagaagctttctttcgtatacgcgccacgaatatttcaggcggatcgtctgcaatttgattggggaatgggtggaaaacggcgaagtgccgcgcgatatggagcttctgggaagcatcgttcaggggatttgctatgacaatgcgaaacactactttcaatttcaagaagagaaagcaaacgtgtaacaaagtgtccgctcagtatcgctgagcggatcactatccgaaaattcttaagacacagaggtggaacatgcgaactgaactggcaaataaggttgtgtcggtcgaaacggaaaaaaggctttcattgaaagagaaaatgtcctatggttttggtgattttggcaatggttttatgtttgatctcggccagatttatttattgaagtatttcactgatgtagcgggaatccccgctgcgatggccggcggcatttttttagtcagtaagctgtttgcggcgataacagatccaattgtcggctcatcaatcgattatcgcaaaaacatcggcaaacgggggaaattcaggccttatctattaatcggcagcctcgtgcttgcggtgcttactgttcttatttttctgtctcccaatgtatcaacgactggaaaactgatttatgcatatgcatcctatatgatttggggcatcggctattcgtttgtgaatattccgtacggctcattaggggcagcgatgactcaaaattctgaggaacggacctccatttcgacgttccgccaaatcggatcacttggcgccttgtttatcacaagtgttgccgtgatgccgctgctcatcaagtttgataatccgaaggtcggctacccggtggtcatgggcttgttcgccgcactcggtgtgctttggttttatatttgctaccgcaactgcaaagagcgcattgtcatatcggaagcacccaaagaaaaattaacactctcatctgtcgtcaaaacatttattacaaataaaccgctgttaacccttgtcctgatgacgattttttcaatttccgcatacaacattaaatccgccatgctcgtctatttcgcacaatataacctgggcaatgttgaattaatggcttatatgaactttataattatcggttcttcctttttgggcgtcgtattccttccaaagctcgtcaagatgtttggaaagaaacgaacggcaatgatcggcttcggcatcagtgtggccgcggatctgatcaactttatgcttccatctaacgtttatgtgtttacaattctcgccagtatcgcctttattggaatcagtatcccaaatggcatcacgtgggctcttgtctccgatattatcgactatggcgaatggaaatccggtgaacggaaggaagcaacgacatattcacttttcaatttctccagaaagcttgctcaatctttgtctggctttctctcggggatcggtttggggattatcggctatgttccgaatgcagtccagacagcacaggcgctgattggcatcaaagcgctgcttcttctgtatccggccattgctttggcattagcgatgatcattatcagctttctttataaactcacagaccagcagcatgctcagatcgttcaggatcttcatcaaaagaactgacaatataatataaagaatatttaaaataatttgtaaataaaatgtgtttgtaggggtttcgctaggggagtgcccaaaaaactgaaaaggaaggaggcacttgtttgaaaacgataacaattgcagctaaagaagcaaaggaactcgttcggcaaaagctggccagtgccggtttgaatgaacgagatgctgaaaaagtagcagatgttctcgtgcacgctgatttgcgcaatgtacattcgcatggcgtgctgcgcacagaacactatgtaaacaggcttttagcgggagggatcaatcctggggcacagcctgtttttaaagaaacggggcctgtgaccggggtgcttgacggagacgatggtttcggtcatgtgaattgcgacatggcgatggaccatgcaattgacatggcgaagaaaaaaggagtcggcatggtcacggccgtaaacagcagccattgcggagcgctaagctattttgtgcaaaaagcggctgacgaaaagctgatcggaatagcaatgacgcatacagacagtatcgttgtcccgtttggggggaggactccttttttagggacaaatccgattgcttacggtgttccggctaagcataaaaaaccgtttatcctagatatggcgacatccaaagtggcttttgggaagattctgcaggcccgtgaagagggcaaagaaattcctgaaggatggggagtcgatgaaaacggagaagcagtaactgatcctgacaaggtcgtctcactttcaacattcgggggcccgaaaggctatggactatcgattgtggtggatgtattttcaggattgctggcgggcgcggcttttggccctcatattgccaaaatgtacagcggtcttgatcaaaaaagaaagctggggcattacgtttgcgcgatcaatccagccttttttactgactgggatacgtttttagagcagatggatgccatgattgatgaactgcagcaatcaccgccggctgttggattcgaaagagtgtatgtgcccggcgagatcgagcagctgcatgaagaaagaaataagaaaaacggaatttctatcgcccggagcgtgtatgaattcttaaaaagcaggtgagaaaaatgaaagcggttcaagtgcgaaaagcgtatgatctggtgacagtggaggtgaagaagccagttctttcaaaggatgatgaagtgctcgtgaaagtcaagcgagtcggcatttgcggttcagacatgcacatttatcatggaacgaatccgctcgctaccctcccgagagtcatcggacacgaggtaacgggacaagtgaaggaagttggtgcgaaagtacagagcctaaaacccggtgatcatgtggtaattgagccgatttcttattgcggatcgtgctatgcctgccgcaaagggcggccgaatgtttgcgccaagctttctgtatttggcgtacatgaggacggaggcatgcgggaatatattgtgcttccggaaaggcagcttcacgcggtctcaaaggacttgccttgggaggaagcagtcatggccgagccttatacgataggcgcccaggcagtgtggagaggccaggtggaaaaaggtgataccgtcctgatccagggagcggggcccatcgggatctgtgtgttgaaaatggcaaagctggcgggtgctgttgtcatgatgactgacttgaacgatgagcggctggcatttgcgaaagaaaacggcgccgatgctgttgtaaatgtccaagcagaacatgttgccaagcgggtccttgaatggactgggaatgaaggagcaaacgtggtcattgatgctgtttgcctgccggagacttttgcgctttcaattgaggctgtgtcaccggcgggacatgtggttgtgcttggatttgatgaaagagcggctcagatttctcagctgccaattacaaaaaaagaagtcacgataaccggatcgcgattgcagaccaatcagtttccaaaagtggtagagcttttgaatggaggccggttagtgcataacgggctggtgacccatacattttcagttgatgacgttcatcatgcatttcagtttattaaggagcatccagatcaggtgcgaaaagccgtcatcacgtttgattaaatgactgaatccggaggtgcgagcatgaatatgacattccgatggtatggaagaggcaacgatacagtcacacttgaacacgtgaagcaaattcccggtgtcaaaggcatcgtttgggctctccatcaaaagcctgtcggcgacgtgtgggaaaaagaagaaatcagagccgagaccgaatatattcaatcctatggttttcatgctgaagttgtagaaagcgtgaatgttcacgaagcaattaaacttgggaacgaagaacgcggccggtatattgaaaactacaagcaaacgatccgcaaccttgccggatttggcgtgaaagtgatttgctataattttatgccggtttttgactggacacgcacggacatgttccggccgctagaagatggatcgaccgctctgttttttgaaaaggccaaggtggaaagccttgatcctcaagagctgattcggacggtggaggatgcatctgacatgacactgccggggtgggagcccgaaaaattagctcggatcaaagagctttttgctgcctacagaacggtcgatgaagaaaagctatgggacaatttatcattctttttgcaggaaattcttcctgttgctgaggcctatggtgttcaaatggccattcatccggatgacccgccgtggccgattttcggactgccgcgcattatcacaggagaggcaagctataagaaactgcgggcgatatcagattcaccgtctaattgtatcaccctttgtacaggttcaatgggagccaatcccgctaacgacatggtggagatcgctaaaacgtatgccggcatcgctccattttcacatattcgcaatgtgaaaatttatgagaatggcgattttattgaaacatctcatttaacaaaggatggttcgatcaacattcaaggcgtgatggaagaactgcataagcaggattacgaaggatatgtcagaccggatcatgggcgccatctttggggcgagcaatgccgcccgggatatggcttatacgatcgggcacttggcatcatgtatttgaacgggctgtgggacgcttatgaagcaatggcaaaaaaagaggtgggcatatgatcccgctgcatgagaacctggctggtaaaacggctgtcatcactggcggcagcggcgtgctttgctctgcgatggcccgggagctagcccgtcatggcatgaaggtggcgattttgaatcggacggctgaaaaaggccaagcggtcgtgaaggagataacggcggctggcggcacagcgtgcgctgttgctgcggatgtgctggacaggatgtcactggagcgggcaaaggaagacatccttggccaatttggcgctgttgatctgttaattaacggggctggcggcaatcatcctgacgcgataaccgatgtggagacatatgaagaagcgggagaaggccaatccttttttgatatggatgagaggggctttctaactgtattctccaccaacttcaccggtgcgtttctggcctcgcaagtgtttggtaaagaactgctgaaggcggattcacccgcgatcatcaacctttcttccatgagtgcttattcacctatgacgaaggttccggcatacagtgctgcgaaagcatccatcaataattttacgatgtggatggctgttcattttgccgaaaccgggctgcgggtcaatgcgattgccccaggcttctttctgacaaaacaaaatcatgatctgctgatcaaccaagacggaacgttcaccagccgatctcacaaaattattgcgggaacaccgatgaagcgcttcggaaaacccgaggatttgctcggtacgcttctttggctggcggatgaatcctattccggttttgtcactgggatcaccgttcctgtcgatggaggatttatggcttattcaggtgtgtaacgaaagcggtgcaacagaaactgaaccaacataggggtgaggttgagatgttttcaaaagataagcttcccgttatcctttttttgttcctggcaggggtgattaattacctggatcgctcggcgctttccattgcagctccttttattcaggatgatctcacattgtctgccacgcaaatgggcttgattttcagcagtttttcgattggttatgcgatttttaactttcttggtggcgtggcatccgaccgctatggggcaaagctgaccttgtttgtcgcgatggttgtttggtcgctgtttagcggagcagtcgccctcgcttttggttttgtcagtctgctgattatacgcattctcttcggaatgggagaaggcccgctttcggcgaccatcaacaagatggtgaacaactggttcccgccgacccagcgggcgtctgttatcggtgtaaccaacagcggcacgccgctcgggggagccatttccggcccgatagtcggcatgatcgcagtggcgttcagctggaaggtatccttcgttctcattatgattattggattgatatgggcagtgctctggttcaagtttgtcaaagaaaagccgcaagagacgattaaggaagcaccggcaataaaagcagaaacgtctcccggagaaaaaattccgctcaccttttacctgaagcaaaaaacggtcctgttcacggcgttcgcttttttcgcttacaactacatcctcttcttctttttgacgtggtttccgagctatcttgtcgacgagcggggattaagtgttgaatcgatgagtgtcattacggtcatcccgtggattttaggctttatcgggctggctgcggggggatttgtttctgactatgtgtacaaaaaaacggcccgaaaaggtgtgctgttctcgcgcaaggttgtgcttgtcacgtgtttgttttcatcagctgtcctgattggatttgccgggcttgtggcaacgactgcgggggctgtcactcttgtcgctctgtcagtgttctttctttatttgaccggtgctatctattgggctgtcattcaagatgtggttgatcaaaacaatgtcggttctgttggcggcttcatgcatttcctcgccaacacggcaggaattatcggcccggctttaaccggatttattgttgaccaaacaggcacgttttctggagcatttttgcttgccggagggctggctgtcttcgcttcacttgctgtgattcgttttgtccgtccaatcatcggcaagccagcgggaacagaagctaagaatcctgtgtcttattaatctggaaatatagtgggagaggcggtatatttgatgatacaatatacagtaaataatcgcagccggtatgataaggaagggaattagatggtaaccataaaagatatcgcaaaactcgcaaacgtatcccacacaaccgtttccagagcactcaacaacagcccttacatcaaagaacatacgaagaaaaaaatattagagctagcagagcagctcaactatacaccaaatgtaaatgcgaaaagtttggcgatgcaaaagtcgcatacgatcgggcttttctttacaagcattacaaacggaacctcacacagcttctttgcagacacaatcaaaggcgtcaatcaagccataagtgaggattacaatctgtatgtgcgcggcattgatgatctgaaaaactatgactccgttacaccgatgagatatgacggcatcattttaatgagccaaagtgacattgataattcttttatttaccatattcgcgaaaaaaacattccgcttgtcgtgctgaatcgtgatattgatgatcgcaccatcacgaatattttgtctaatgacaaggaaggctctcaagaagctgtagaatacttcattcagtccggacatcaagacatcgccatcatcgaggggatcgaaggctttaaatcctcccagcagcgaaaggaaggctacttatctgcactgattcaacatcatattccgatcaagcatgaatacagtgtcaaaggacagtacgatatggaaagcggctttcaagcgatggagcggctgctggcactgccgaatcctccaaccgctgttttttgttcgaatgatgacatggcaatcggagcgatgaatgcgatattcgcaaagggcctgcgcgtccctgatgatatttcggtgatcgggtttgatgatattggtttttcacagtacatcacgccaaggctttcaacagtaaagcgcccagtggagaaaatcagcgtgcttggcgcgcaaaaactcttgtctctgatcagcaagcccgaaacaaaagcagaaaaaatcttggaaaacacagaatttatggtgcgtgattcagtcaggcgattgacgacgtgatgtcccgtttttcagcgggcattctttatacagaaaaatgttaacgtgtgcataaaaggagagggaggcaatacgggtgcagaagctgaataaaaatgtgtacgatcactatactcagtatccagaaaaaattctccagttcggagaaggaaactttcttcggggatttgtcgattggcagattgatcaattgaatcaacacactgattttaatgggagcgtggcagttgtccagccaagaggctcagaaaaaatcaaacgattaaatcagcaagatggattatatacgctttttttacaaggaatgaaagacggagaagcggtaaacgagcatatgattatcaactcaatcagccgggggattgacctgttttctgattatgaagcatacaaagaattggcatcaagcgaaaggcttcggtttattatctccaacaccactgaggctgggattgtatgtgatgaaaaagatcgtttagaggataggccgcaaaaaacattccctgggaaattaactgcatttctctacttccgctatcaggcttttaaaggagatcagacaaaagggtgtgtcctaatcccatgtgaactgattgagaacaacggcgaaaagctgaaggaaacggttcttcattatgcaggtctgtggaagctggaggaaggatttacacagtggattcatgaggccaatacattttgtaatagtttagtagaccggattgttccgggttttcccgtcgacagcattgatgagatcacggcggatcttggctatcaggatgatttgatagttgtgggagagcaatattatttatgggttatcgaggggcctgattggattggaaaagaacttccctttgcggctgcagggctccatacaaagatcgtcagcgacctcaccccataccggactaaaaaagtaagaattttaaatggcgctcatacagcaatgacgccagtggctttattatacggcttgaagactgttagggatgcagtcgagcatccggaagttgggcgatttataagagagctgattgatgacgaaattcttcctgttttaaaaatggaaggtctttctcagtatgctgacgatgtgctgaaccgttttaaaaacccgtatattaagcattacctggaaagcattgcattgaacgccatttccaaattcaaaacgagaaacctgccgacacttaaggaatatgctgaacaaaagggacagcttcctgaacgcttggtgttttctttcagtgctcttctgtatttttatcataataatgagacattgcaggatgatccggcagttcttcaatttttcaaagaggtttggtgtcaggaggatggcgacatgcttcggattgcatcaagagtgttaggcgaacagtggctgtggggggcagatctcaatgagataccgaagctgactgatagagtcgctgtttacttgaatcatattcatgagctgggcatgcagcgggctcttgaacaatactgcatacaagggggagaggtacgttgaagtcgtttataaagattcataagcaagataatgtccttcttgctctgcgggatatccaaaagggagagaggctgcatgcggacagcgtgtcgattgaagtaaaggatgatataaaaagaggccacaagattgcattgaagcctattaaaaaaaatgacagcatcatcaagtacgggtttccaatcggtcatgcatcacaagatatatcgatcggagagcatattcatgtccataatacgaaaacaaacctgtctgatatccaatcatacagctatacaccgagatttgatgaaaatccgtattctaatgagaaccggacgtttaaaggttttagaagagaaaacggagatgcgggtgtacggaatgaattgtggattgtcccaactgtcggctgtgtcaatggaatagcagaaaaaatgctgcagcgttttgtcagagaaacaggggatattgctccatttgataacgtactggtgttaaagcatcaatacggatgctcgcagcttggcgacgatcatgaaaatacgaagcagattctgctgaatgccattcgccatccaaatgccggcggcgtcttggtgttagggcttggctgtgaaaacaatgagctggcaagaatgaaggaagcactgcaagatgtgaacttgaagcgggtgaagtttctggaatcccagtcggtgaccgacgaaatggaggcaggcgttgctttgctgaaggaaattcatgaagcggccaaagaagataagagagaagacattccactgtctgaactgaagatcgggctgaaatgcggaggttcggacggtttttccggcataaccgcaaacccgctgcttggacgtttttcagattatctcattgcacagggagggagcacggtgctgacggaagttccggaaatgttcggcgcagaaaccatcctgatgcagcgggctgccaatgaagaagtgtttcataagatagtccaattaatcaatgattttaaacaatattttatcaaacatgatcagccggtgtacgaaaatccttcaccgggcaacaaagcgggcggcatttctacacttgaggataaatcgctgggctgtacgcaaaaagcggggatttctcttgtcacggatgtcttgaaatacggggaagtgctcaagacaagagggctgacgcttttgagcgcgccgggcaatgatttgatcgcctcctccgcattggcggctgccggctgccaaattgtcctctttacaacgggaagaggcacgccgtttggcacctttgtcccgacggtgaaagtagcgacaaacaccgagctgtatgaggcgaagccgcattggattgattttaacgcaggtcttttagcagaggatgatgttcatgaggaatatgtgctgcgtgagtttatccactatatgattgaggtggcaagcggccagcttgtgaaccatgaaaaaaatgatttcagagaacttgccatttttaaatcgggtgtgacgctataataagaaaaggctatccttcaagcggatagccttcttcattaaatcaattttaaaccgctgactaaaataatggacgccataataaattgcagcggacgcggggagaatcgaggcgaaagatggctcccgatcagcacgccgggaattgaaccgaggagcagattagctgccagcatgtaatccacgcttccgaagcttgcgttcaaaatgcctgctgccgtaacaagaagaaaagcatgcgcgatatcggttccgacaatctgtgacgctttcatgttaaataagtaaatcatggcaattgcaaataatgagccagaaccgattgatgttaatccgacgataaacccaaacacaacaccaataagaattgtcagcgccctcttattttcaagcggcatcagctgccagcggttggggcgaagttttctatccaaaaacaaacgaacgatgattgaaatggcaaccagcgttaacacatatcctagagcgtgcttaataatttcttcctgatgctggtgaaaggcggggaacaaatgcaatatgccaatggctagcgaagcactcggaatactgccgatggctaagtattttaccaatttaaagttaatcgttttctgccgccaatgggaggcaacgccaaacagctttgtgatcgagttatatacaagatccgtaccgaccgcgatggaaggattaattccaagcacaattaaaaggggagttaataaggccgctccacccactcccgtcaatccgactaaggctccgacaaacaaacccatcaatatgatgcttacactcatgataaaggcctcctgaaaacccgactatttttatcagattatatatgattaggacgcgttaatcaattaaattttttgaatttttgcacgttagctgcttgaaattttggtatgctcaatatctctattcatttgccctataatgagtgtctggacgaaatcgagaagtactaaaggcgcaaaaaaaagatacctcttaacaggtatcttttttcttgtttacgctacatgcgctgctgatagaaaggaagctcagtgtggcccatttcccgcacatacacgaacaggttgcctttatggtgaatttcatgctccattgcaagctgaagcagcgcgcggcctgtgacttttctgccgaaagcggatgtcagatcaatttctctgtccagctgctcttcagtcagctgttcaaggatagcggccgttttttctgtatatgtttttgccagaacattgagatctgtttctgtttcctcctgcttgttttgaaatggtgaggcattgccttccttaatgacatttgcgaacaagtggaaagacgtaagaatgtgtttgaccagttcttctgctgacattgatgtttctgccggtttgtagctgtaatggtctttgctgattttttcggcaagctcattggtcacgtttcgatgggataaaaaatggctgacaatttgattggattggctcattatgatctcctccatatgtaaaaataaatggtgcaatgaaatcctatatcaacggttatgaattcacaagtaatatgctgtgggatgaaacaaaatgctatgtcaatcgtatatataacgttcacaaaacatgaaatggagtataaacatgactaacatacctttcatttatcagtacgaagaaaaagagaatgaaagagctgcggcgggctacggcactttcggttaccttatcacacggattgaagaaacgctttatgatcaatacggtgtattctatgagctctatgccagtgatgatccaaatacggaatactgggagcttcttgtagaagatgtccgcagcggttcattggagcctgagcatgtggcatatatatttgaaaagcttgaaaagaaaacctttgcttacgatgaagatgagaaagaaccggattataccgtccataagtctataagaaacagtgtatacgcgtatcctgaaaagggagttgcttttgccagaattccatattttcaagatgggagcattatgagttttgattgtctgtttgcggttaacgatgaaaagatgcgtgcatttctggagggagtcagaccgcgtctttgggaaaaaagcaagcggaaagtgaccgtgtttacggatggagatggagggacttcaagagagcaggaagccattgtcagagaggttcagcggagtcaagtcatcatgaatccgctattgaaaaaagagatatacagatcaattgatcagttttttcatagtgataaatcgttttatcaaacatatgacatcccttacaagcgcggcattctgttatatggacctcctggaaacggaaagacgacgttagtgaagtcgatcgcaggcagtatcgatgcacctgttgcttattggcaaattactgaatttacgtcgagcgagacaatagaagaagtctttcaggcagcgagacgcctcgctcctgcagttctggtcatcgaggatatagattcgatgccggaagatgtgcggtccttttttctcaatacgctggacggcgcgacatcaaaagaggggctatttctcatcggtacgacaaactatcccgaagagatcgatccaggtttgatgaatcgtgcagggcgatttgatcgtgcctatgaaatcgggcttccggatgaagagctgcggctggaatatatgaaaatgagaggctttggcatctttttgagtgaaggagaaataaaaaacgccgcaaaacttacagaaggcttttcctttgcacagctgggagaattatatgtatcttcagcccttcaatggcaccaagaagggaatcaccatattgaaaccatggtgaaagacatgacaggagagcaaagaaaaagccagcggggaagctggatggaaagaaacaaagtcggttttcactaaaagaaagcacgggtgtttgaaaaacccgtgcttttttgttgcggttagccgaaattcgacaattgcggttattttgcgttcttctttttcttgcaaatatgataaaatatgacatatctcgggtaattcaaaaaggggggattaattgaggatgaagcagacgattccgtcctcttatgtcgggcttaaaattaatgaatggtatactcatatccggcagttccacgtcgctgaagccgaacgggtcaagctcgaagtagaaagagaaattgaggatatggaagaagaccaagatttgctgctgtattattctttaatggagttcaggcaccgtgtcatgctggattacattaagccttttgaagaggacacgtcgcagctagagttttcagaattgttagaagacatcgaagggaatcagtacaagctgacagggcttctcgaatattactttaacttttttcgaggaatgtatgaatttaagcagaagatgtttgtcagtgccatgatgtattataaacgggcagaaaagaatcttgccctcgtctcggatgatattgagaaagcagagtttgcttttaaaatggctgagattttttacaatttaaaacaaacctatgtttcgatgagctacgccgttcaggcattagaaacataccaaatgtatgaaacgtacaccgtccgcagaatccaatgtgaattcgttattgcaggtaattatgatgatatgcagtatccagaaagagcattgccccacttagaactggctttagatcttgcaaagaaagaaggcaatccccgcttgatcagttctgccctatataatctcggaaactgctatgagaaaatgggtgaactgcaaaaggcagccgaatactttgagaaatctgtttctatttgcaagtcggaaaagttcgataatcttccgcattctatctactctttaacacaagttctgtataaacaaaaaaatgacgccgaagcgcaaaaaaagtatcgtgaaggattggaaatcgcccgtcaatacagtgatgaattatttgtggagctttttcaatttttacatgcgttatacggaaaaaacattgacacagaatcggtctcacacacctttcaatttcttgaagaacatatgctgtatccttatattgaagagctggcgcatgatgctgcccaattctatatagaaaacggacagcccgaaaaagcactttcattttatgagaaaatggtgcacgcacaaaaacaaatccagagaggagattgtttatatgaaatctaaatggatgtcaggtttgttgctcgttgcgatcgggttcagctttactcaggtgatggttcatgcaggtgaaacagcaaacacagaagggaaaacatttcatattgcggcacgcaatcaaacatgatgcataaaaaaagacccttaggggtcttttttatttcttcagcttccattcttttatcgtcagctcagaagatccacttgccaccagcggatccgcatggccgatttccgctgcctcttccagtgaatctgcttcgatgacatacgctccgcctgtggcgtcgctgaatggcccaaacatttttaaacgtttttctgcctgtaaacgatccagaaattcatagtgcccagccacatgctcctgattaaatttctccgttctcattgtcagcattaaatatgtatacatattcagaccctccgtgaacttcagtttaacacatttatccatattacagtgatagatgatatgagcttttcgtcctacgaatgccacctatttatgaaaaaagaaaaggagagatgataggtgagcattccagtaaagaaaaatttggtttctgaggcgaaatacgcgttgaagtgtcctaatgcaatgtccgctgaatacattaccattcacaacacggcaaacgatgcgtcagcggccaatgaaatcagctatatgatcgggaacacaagctcgacaagctttcattttgcagtcgatgatcaagaggtgattcaaggtctgccgcttaaccgaaacgcctggcacacaggtgacggcacaaacggtccgggaaaccgcaaatcaattggcgttgagatttgctacagcaaatcgggaggcccgaagtatgaggcagctgaagccttggcgatttcatttgtagcacagcttttgaaggagcgcggctggggcatcgatcgggtgagaaagcaccaggactggaacggaaagtattgcccgcaccgcattttatcagaggggcgctgggatcaagtgaaggcggcaattgaaaaggaattaaacgggggcgtatcagctaaaaaagctgcagtctcttcttcagcgtctgaatatcatgtgaaaaaaggcgacacattgtcagggattgccgcatcacacggagtcagtgtgaaaacgctgcaaagcatcaatcatattactgacccgaattacattaaagtcggacaagtgatcaaactgcctcagacggcatctgcttctaaaagccatgccgcatcctcatatccgctcccatcaggcgtgatcaaagtgacaagcccgctgacgaaagggacaaaagtaaagcaggtgcagaccgctttagccgctctttatttttatcctgataaaggagcgaaaaatcacggcgttgacggcgtttatggcccgaaaacagcaaatgcagtgaaacgttttcagtctgtcagcggtttaacggctgatgggatttacggtccgaaaacgaaagcgaaaatggaggaaaagctgtaaataaaaagacggaagctgtgaagcttccgtctttttatcttacatacaaactgcggcaagcaccttttgaatatcataaatgctctcatcttttttaaactgctttgagacggcaggaagttctgcgccggaaatccaaattttcagttctgaatcgaggtcaaagcggccggccgtttccacgctgaatctggaaatgcttttgtacggaatcgattgaaattccgttttcttgcctgtgattccctgtttatctacaaggataagccgcttgtcagtaaagacaatcaaatcgcgaaccagcttaaacgcggcttcaacattctcaccctccagcaaaatatgggcaagctcttctttcacagcagccgttgacagtgttgacgcattgccgagtaatccatcaataaaccccatcatatacctcctcttcgtattctatcaaatcatactataaaaaaggttttcattcatggatgagtagagtaaacttgtgctgactggtaaagggggcgttcaaaatggaagatatgtatgacagctttgcagccctttctgcttctgagtcggagtatcggattatttatgaggagaaaaacggaagtgagcttattgtcctcggtcctcacggcggcagaattgagcctggcgtcagtgaactggtgcgggcattttcggatcgatgttccatctatttgtttgagggtctaaagcagcgaaacaaccgttccttgcatctcactagcattcgttttgatgagccgctggctttagaaaaagtgaatgaccaccattacgcattagcgtttcacgggtattatgatccgaaaatcccgcatacattggtcggggggcggatcgtaaaaaagccaagctcatttgtgagcgtctgaatgaagcgggttttagcgccgagctcaccaatgagaaagaccgcctggcaggtgtacacccaaacaatattgtcaatcggacgaaaagagaaatgggactgcaattggaggtaagcacggcacagcgaaatgcgctattccgcaattttgggtgccgtgataaaagctacatacaaaacgatttgtttgatcgatatgtggaagccgtcaagcttggcttttataaataaaactagacgggacctgcacggtcggcctattccttcatacgctggggttgtgcgaaagtgtggggaggaatgattcatgttttatcatataaaagagcttcaatatcaagcaaagccagctcatcctgatccggtttatgcgaaaaaacttcaagaggtgctcggcggccaattcggtgaaattagcgtcatgatgcagtatttgtttcaagggtttaactgcagggcggatactaagtatagagatttgttatatgatgtggggaccgaagagattgggcacgtagaaatgctggcaacgatgatttccagacttctggacaatgcacccgcggatgtacaggaggatgcttataaaagcaatcccgctattgcagcagtcatgtcagggatgaatcctcagcacgcgattgtgtccggattgggggcgatggcatcagatagtgagggctatccgtggaatgcaaaatacattatctcaagcggaaacttgctggccgattttcgcgctaacttaaatgcggaggcccaaggacgccttcaggtgacacggctttatgccatgaccgatgatccaggggtaagagatatgctgtcatttttgattgcaagggatacctatcatcaaaatatgtggtatgcggccattaaagagctggaggaaagagaacgggatattgtcgtcccgacgacgtttccgcgtgagctcgaaaaacaggaagtctcctatgacctgtttaatttttccaggggggatgaaagctcacaaggaagatgggcacatggggaagcctttgacggccggggtgaattcaggtatatcccggctccgattgcgttcgcatctgcgcctcatcttaaaccggcgcccatgtggctgcataatacagttcccccaatgtcgaaatgttaggttctcttctgggctgaggaatatatcctcagcccttatttgatcagatgtttttgccaatatgatataacgctttttcctcagcgacctgcaagtgctgttgatcgccttcctcgtacgcatgtggccgcttgtgagataataaataagcgagccgcttctgaaattgaatacctgctttacgccgttcaaacatgtcaagccttttatcagcaaattcctttgttacccggaataccgccgaaattgtggcgagtgcctggcttctccattgcggcagttccatctgcaacagcataaaggttggcacacagaagtggtacataaattgatttgcctggaattcttgaagctctctgaagagcttgttcatctgaaaatgattgcctgcatgctttaacacgtggcacagctcatggccaaaatcctcccattgctcttcccgtgactttttttggtttaatacgatactatacatgccgtcgtatttcaccatcatgctccccatatcctcaaaatgcacccgaatatccagatcctttgcgattttcagcatgtcaatgtgatgaggggatgtgatgcccagccggccgtataaatttttaacgtattcctccagatgtgataagtaatcgcccaattgaatactccctttcgaacatttgttctatttttagcgagaaagaaaagcccgtataggactggaaagtagcgtagaaatctttcccttttctttaaaaaataaacacttttttctttatatcggtctactttttatatgttttagagaacagagaacgatttatttatttttcggtttgcggtttttctctttttcttttaaatagttgataaattcgatggcctgctgtttgctttctggggaaaaatcctgcatatcgcggtatgcaagctgcaggtccggatctgagaacatatcgtcatcggattttttgtctttccccgttaataagtaatcagtcgttacttgaaagtaatcagccagcttttggagtgtgtcgtaatcaggttcgcttcgcccattttcatagtgggaatatcgtgcccgtgacacaccgatgtgtgatgcgatctcttcctgtgtccttttccctctgagactcttcaatctgccgcctatcatactatgacctctcttttttaaactccctacgttacttatgattatagatacaaaatgtatcaaaataaagttatgataaaaaaagtatcaaaaataacttgatgatacagattgtatcgtttatacttggtaacatccgatacaaaatgtatcaaaaaagatcaggagagtgatcacatgtatccgatccaaatcgtttttagtgaaaatcccatagatcagcgccatctcggacaatccggcggcaccatttcgtttaccgcatgcggccttccggtgtttcactttgaaacgcaggaacagtttcaagcatacatgatgttaaaaggagaagcggcgtacaatgaaaaacgataaaagctatccttttccgacgtattcagggttattgaattcagaacattatgacaaaattggcccggcgttatggctgtttctctggtttatcagctcaacaacaaaagaaatcgaaaaagacggcgtaagctggggcatcgtactcggccataagccgttaaaagcgagagaaatggcggcagtcttcggcgtaagtgaaaaaaccgtcagaagatggctggagcttctcgaaaaccatgattacataaaggccgtccgtgcgccatacggactgatgatttcggtcaagcattccaaaaaattcagcttcagatcggacaatactgtacacgggagtctaaaagaacggccattttcgccgcagacaccggacacaaacgaccgtacagatatagataaaacaaacaaatatactgctgctgatgatgcagtggatcacattgcgaagcggtttacacaattacggtcggctcaagaaggacgcaccgtgtatccttcctcaagagattatcaagccatcgcccgcattgttgccattggcgttcctgtcacgcaaacaatcaaatggcttgaagaatgctttcaggcttttgaaaaccggcggaccgccgcttctgaaacaatcaaggcttttcgctactgctcgaaattcattgaagatcgatttttcgcgcagcaagccaaaaagaatgccgcaattcagcatgagaggatgaaaaaacatgacaaaacgaacaatcgaacagattttggacgagctgagaagagggagacgtccattactggcggacaaaccggccgaatcagacgcaagcaggtatgattgcctgcgctgcaaggatcagggaggttatctcgtcagacagaatggcctggaagtctggacgatgtgcagctgcatggcagaacgaaaagtgaagcggctgctgggtgcaagtgagattacccacgctttcagacagctcggcttcaaggaattccgcacggagggaaagccgcaggccataaaagacgcattggagtgtacaaaagagtatgttgccgattatgaacaaatcaaggattgccgaaaaaacagcattgcccttttaggacagcccggatcagggaaaacacaccttttgaccgccgcagccaacgaattaatgagaacatgctatgtgcctgtcatttattttccgttcgtggaaggctttactgatctgaaaaatgattttgccctattagaagcgaagctgaaccggatgaagcaggcggatgtgctgttcattgatgatctgtttaaaccggttaacggcaaaccccgcgctacagattggcaattagagcaaatgtattcggtactcaattatcgttacttaaatcataaaccgattttgctttcaagcgagctgacaattgaagcacttgtacgggtcgatgaagcgctcggcacgagaatctatgagatgtgcagtgactatttagtgattatcaaaggagcagcctacgagcttaaccatagattggagggcgtcagataatgtgcaagctttgtcaaacaaagaaagtcattgtggaacataccggtattggggtcgtttttcatccatgtccgaactgtcggtccggtactgacttaacgcctgtcattcaaaagctggagcaaatgctgacagcgggaaaagcgaggctgaatatctatgattaaacagctgactgcactaatcgctttgctgtttcgggcaaagcgaacagaaaaaaacattgaacaatggtataaggacgacgggaagtgaaagtgttggaaaaaacaaaacagacagagaaaagccctgcgccgtggcgtgctgtcccgtgcggggatacgaaaccgatctatatttattcagcttacagtgaagaagaaaaagaaagattcccatattcaaacggacggctgattgccgctgtatttgaccttagctcttattcgcaaaaaagcaatgccgctttgatggccgctgcgcctgaattgctggaagcgtctaaagcagcgcttgattttctgaaagggaattctgttcattcaaaggagcgcatcattcagctattagaaaaagctgaagcaagcgctgcaccgaaaaggggaggaaataaaacatgattcatcctaaaaaactgctgcatatcgattccgtcacgcttaagagccagctggaggacgggaaaatccgtgtcattattgtggatggcatcaagcaagaagcatggatcacagaagcgcccgagcatggaaaaacgctcgtcgaaacaagaaagggcgaccttgcccgagtggaatttgaaatcggctacaaattaaattaaagcgaaaacagaatacgtccaagacggaaagcctgcggacactgatcaactgcacagcatttgtgcgttgattggtgtccgttttttatttgccaaaaatgaggaggatcatagaatgcaagacttactatttgaatataaacgaacgctcaaacaaacaagaaaccaatataaaccgctcgctgaggcagatgaatccgtgctctcagctgaagagctgaaggataaaaaaatcatcagaaatatgattactgatcttgaatatgtaacagaatggcttgaaaaaggaaggcagcccggcatcagacgggcgattgaccggcgtgatgcttaccagcggctgatgatcaaggacccgagaatcatcgaatcattttccagcgctatgatgtttgagccggacggacaggtatcagaagaagacagagatagaattcgagaagcattagccctgttaacggacagagaaaaggaaatgtttttgctgcataaggtagaatgtttttcttatgaacggatcgccgatcttctcggcgtaaaaaaatcgacagtgcaaacgacgattaaacgggcgagtttaaagatgcaaagacagcaggaagacatgaatcgatcacttgcctgaaagcttgtcatacgtttgccacctataagtgaatagagcatgacacataagcggctggctgatcagccgcttttatgaataaacaaccatgctggaggtggcggtgatgccgtagcatgaaaacacaacttcgcgaacaagcattagcaatctatcaacaacatcaaggaaagatcacaaatcgggcgatcgcggacacaatcggtgtttccccgaaaacaatcggcatctggaaaaaacaagacaaatggaaagaggccctgttttctgcgtccaaaaacgaacaaaaacagcgccctatagacaacgatgaattaaatgaacgccagcggctgttttgcctgtattacgtcaaaagcttcaatgccacacagtcagcaatcaaagcgggctattctccggacagcgctcatgtgacgggcagccggctcttaaaaaacgaaaaggtcgctgctgaaatcagacgcataaaaaaagaaatggtcaatgaaatgtttattgaagcgatggacgtgctgcaggtttatatcaagatcgcgtttgcggatattacggactatgtgaccttcggaaaaaaagaggtccaggctgtcgggaaatcgggtccgctgtttgatgaagatgataatccgattatgaaggaaatcagctttgtcgatgtcaaagactccgggctcgttgatggcaccattgtaacggaagcaaagcttgggaaagaaggcattgccatcaagcttgcagataaaatgaaggcgcttgagaagctatccttatattttgatttgtttccagatcaatttaaacaaaaaattgaaaatgagaagttgaagcttgccaaacaaaaagcggagaaaacagatgacagccaagagccgattgaaattatgatcaaacgaaaagagggcaagtcatgattgtaaaagaaatcaaccctcatttcgaagattacgtgttcaattgggagcagacgtaccaatttctcgtcggcggctacggctcatccaaaagctatcataccgcattgaaaatcgtgctaaagctgctgaaggaaaaacggacggcccttgtgatccgggaggtgttcgatacccatcgggattcgaccttcgccttgtttcaagaggtgatcgaagagctcggtctcacaaaggctgtggcatctctttcttccccgctgcagctgcgatttcacaatggcagccggatcatgttcaaaggaatggacaatccggcaaaattaaaatcggttcataatatttcattaatatggattgaagagtgctcagaggtgaagtatgaggggttcaaggaattaatcggacgtcttcgccatcctgagctgaagcttcatatgatctgtaccaccaatcccgtcggcacctccaattggacgtacaggcatttttttcgggacgaacgcaataaacggtttgtgctggatgacagcgaactttacgaaaagcggacaattgtgaagggagatacgtattaccatcattccaccgctaacgacaatctttttctcccagaaagctatgtgaaacagcttgacgggctcaaagaatatgatcccgacctgtaccggattgcccgcaaaggaagattcggcgtcaacgggatcagggtgctgccgcagttcgaggtactcccgcatgatcaagtaaaaaaatgtatcgcagccatcagcaagccaatctttcgtacaggtatggattttggattcgaggaatcctataatgccgtcgtccggcttgctgtagatcctgaaaaaaaatacctctacatttattgggagtattatcaaaataaaatgacagatgataggacggctgaggagctgcgtgagtttattgagacacaggaattgatcaaagccgactcggctgagccgaaaagcatccaatatttccgccagcagggctttcggatggttggagccagaaagtttcccggctccaggcttcaatataccaaaaaggtaaaacggttcaaaaaaatcttctgttcggaccgctgtgaaaatgtcatctatgagctcaagacacttacgtatgccaaagataaaaacggagctctgattgaggatgaattcacgattgacccgcatacgctttctgccatttggtatgcgcttgatgattatgaggttgctgatatgaaagagacagcacacaaacgaatccggccgaaccgagaaaggaggaggtcataaatcatgcacaatcaaacagtcagagcaactgtatttaaagccaatgccgaggctcctcagacaaagcaaatctatgaggatgacttttctgagctgtacggagaggacattatcgctccgccctacaatatcatcgagctcaaaaccattgccgaatactcgaccattcttcagcaatgcattgatgcgtacagagtgaatattacaggctttggattcgatgttgagtacacatttgatgtcaacgcaagtgatgtcgatcaggcaaaaaagaaaagagcggaaaaagactgggccagactcgaagccttttataaatgtcttcactttgatgaatcagctgaaatgattttaggctatgccatcgaagacagagaaaaaacaggcaacggatttatggaagtgcttcgcgacggggcgggaaaacctgccggcatcgaatatttagatgtgaaatatatgcgtgtatgcggagcaggcgagcctgtagaggtttcatttgtatatgaagaaaacgggaaaatgaaaaggatcaaaaggcaaaaacgcttccgaaaatatgtgcagatgatcaatggaaagaaagtattttttaaagaatacggcgatccgcgaaaaatggatattcgcacaggtgaatatgtaaacacattggcagagaagtatcaagcaaatgaagccattcacctcaaaatcggaagcggcgtatacggtgtaccccgctggatcggcaatattgtcaatttatacggggcccgaaaagcagaagagctcaattttatgtattttaagcaggggcgtcacgtccccgctgcgattacagtggaaaacgggatgctgtctgaagcttcttaccgggagctgcaggaatacatgaatgatcttgaaggcgtggagaacgcccataaatttctcctgatcgaagcggaaggaatcgcaaaagaaaaggatctccacggaggcgaggatattacgccggtttccgtggaaatcaaatccttggcggaaattctccaaaacgacgccctgtttcttgaatacgatgaaaaaagcagaaataagctgcgttccgcgttccgcctcccgccgctgtatacaggcgaggcccaggaatacaaccgggcgacagctgatactgctagaaaaattacggaggagcaggtttttcagccggagcgaaaaacgctcgtgaataaactgaacacgctgcttttgccggagctgaatatccatgacgtcaggctgacattaaaaggaccggactttcgtgatccgcttgagattgcgaaggtgctcggtccttttattacagccggagcagtctcaccgaatgatttacgtgaccttgccggacgggtgcttggaaaaacactggaggagtggccggaggacatttataaacggcctgcaggacaggatgcggaaaagacaaacctgactgcgctcatgcaggagttgaaagaaagcatcgaagatatcaaaacgtcctgaagggaggtgaatcaagcaggtggcgcgagaattaagaaatgccaaaatcagctttgtcagttatgtggacaaggcggctaaccagacagaatttttctttacgaagtcagccaaacctccgtcatttgaaaaaaaggttcggctgtttacaaaaagtgagcaggatgaacaaaagctcgtgtacggaatcgtgtatgagcctgatgttcctgatgcccacggcgattttatgaccgccgaggaaattgaaaaagcggcgcacggttttctcgcggaggcacgggagattgatatcaatcacagcttcgagggcggaaccggcgtcgtggtcgagtcctatgtggcgcccgatgattttatgatcgggtcaaagcggattacaaagggctcatgggtgctcgtgacaagagcgtcagacgaggtgtgggaacagatcaaggctggaatcatcaccggctacagcatggcgggcactgcagatgtatatgaggaagaaccggttgaaaaagcgggattcttcagtgtattcaagcaaatgcttgctgacaaaacagggaaggagactgaagaaatgagaaaagaagacatgaaagaatcattcgagcatgcgctttaccctctgctcaaacggcttgagcggattgaaaaaaacacagacacggaggaaaagccggagcagacgggtgatgacgagcgtctgaaaaagctcgttgaagacatgcttgccccgctgatcgaacgcatcgaggctttggaaaaagcgcgaggcgcgtctaagcagacagcggacgatacgggcggcaatacagagcaagtcaaaaaatcaatctggagcggactgctgtaaaaccagtcaaggaggaggaaatcaattgagaaatcaagagatcattcggaaagcggaaatgtcgctttctgctttaaaaagcggcgggcttatgaaccctgcgcaagcatcggcttttatccgcatggtgcaaaacacgccgaccattttcagtgaatcccgcgtgattcaaatggaaaatgactcgcaaaaatttgagaaaatcggcttcggccagcgtattctgcgggctgcgcaagaaggaaaagcactgtcaaacgacgagctgacagttccaacgacaagcactgtccagctgaacacgaaggaagtcattgcggaaatcaacattacgtatgacacacttgaaaacaatattgaaaaagacggcctgcagcagacgatcatgcaaattttagcagagcgcgcagcagttgatattgaagagctgatcgttaacggcgatacagcatcagctgatccgtatctggcacagctggacggcatccgcaaacaggcggtttcccatatcgttgacatgaacggtgaagaactgtccagagcgacatttaagaaaggcttaaaggcagttccgccaaaatatttgcgcatccctcaggaattcagattctatacgtctcacggcttagaagttgaatggaaggaccgcgtggcagaccgccagacaaaccttggggaccaggctgttcagggcggcttgtcaacagcattcggcgtaccggtcaaaggagtatccaatattcagccgtacacagtcggtgagggagacgcgcaatatgacgcttctgatatcattctcacacatccgaaaaatatcattctcggcttctcccgcaatatccgaattgaagtcgacaaagacatccgctcccgtaaatttattattgtcttaacggccaagctggacagcaagttcgaggaagaggatgcctgcgcaaaattaattaacgtaaaagaataatagaaacgaggtggtcagctcatgctcattgaaccgactgacgtagcctcctattcggtctatgatcgggtgaaaaacaggccggaagagctgctggcgcaggatatcatcgaggcggaagcagaagcggctctcatcacgggccaccgctttgaagacagcttgtatgatccgctgcccggcaaggtgaagttggctttagtaaagcttgcccagtattttgcgcttgtcaacagcgatgaatctgcctcatcaagctatcagtctgagaaaatgggggattattcctacacggtttccggagaaggcggcattcagcggccagaggtatatcatttgctcgaggagtttatcacgccgggctacgcccctgaatcctccagactgaaggtgaggtctttatgagctacaggcagatgctcattcatcgctgcgacatttatcatgaagcagcgcaagcgccgtctgcaggccgatttgggattccggcagacaggctgcagccggtgatttcatatccggatacacccgatgaacaagatgtcccttgttattttaccgaaaaaacgcagcagctgattcaggaggagccggatcaaactgtatatcatagctttctcgtccattttccgttgtcagcggacatccgcgtgaacgataaaatcatttgggagaatcataaatatatactaaagctgccgaaaaggatcagacatcatcattgggaggtcgtcgcagtcagggatgaaagcctatgaaaatagcgggattgaaacagctgaacacggcattaaaagaagcggcttcaggcggtttttccagacaggcgtcccggtggcttgaggagtgcgggcaagattttctggagatcgtcaaatctgaactcatcagcacacaaacgattgatacagaaaaactgctcagttcctttgagaaaggcgcagaggacaatctctggattgtgcaaagcggcgggctttcgcttgaggtggggacacagcttgattacgcctcatttcttaatgacggccattggacgtcaaaacaagatgtgagatgggtgccggggcgttttcaaggctcacggtttatttatgatccagccgcttcaacgggaatggcgctcaagagaaaatggataccgggcacgggctactgggatcatgcactgcttttatatgaacagctgtttgaaaaatcgctggaaagcaaactgcgccagtggctgaagaagctgtaaaggaggagcaggatgaacagtgaaacaggatcgatcatggcgtttttgtacagccggtggtctgttcccatttatgaacgcgagcttcctgatcactttcaggtgccgtcgttatacgtcccgccaccatctgttttcgaggaaacagatacggtctccacatttaaaaaaacctacagtctcaatgtaaaactgtttcatctggactccgttcaggcgctggatgaagcggacaggctcgcggatgccatcagagaagcgagaaatatgattccgctgctgagtgaatccggcgagaagacgggggatatggttcgcatctcccaaatcgagacaagggtaggggacaggggcgaggcggccatggtgatcaggtggagcagccgatattattatcacaaaacagaacagcctgtcttacaggatatcgacatgaacagcggggtgaaataaacggtgtcaaaggacaaacaacagaagaaggctgtacatacaaagagccgggaagctctatttgatacagcggatttgattaagcacgcgaaggaactgttcggcgttaagccggatattcttcagggggctttatttggcgtggatcaaccacgtatgacgaaatcagaagccaaccaattgattcaaacatttctaaccaaggaggtcatgtcatcatgaatggcggaacatttacaacaggcaaagaaaaagaacgtgcaggtatttattttaactttaaaacgacggcacaggagcgggtatcactcagtgaacggggaacagtcgcacttccggtcgcatcaagctggggcgaagcgaaaacgttcgtctccatttccagcgttgaagacctaaacaaaaaagtgggcctcagcattgatgacccgtctttattgctgctgcgtgaagcgaagaaaaatgcgaaaacggtattgatgtaccgtctaaccgaaggtgtccgagcgtctgctgatattgctgaaggcgtcaaagcaactgcagtatatggcggaacaaaaggaaatgacattatcatccgcatcaatcaaaatgtgctggatgctaattctttcgatgtgacaacatatatggacgaatcagaggttgataaacagactgtcaaaaaggctgaagaattaacagctaacggctatgtcacttttaccggaacaggcgatctttcttcaacgattcctctcactggatcagaaggagacactgcagctgagacgctgaatgcatccgcgggaatccgtttatctggcggtacggataaagcccctgtcaactccgactatacagatttcttagccgcggctgaaacggagagctttgatgtgattgcgctgcctgttgcagaaggtgaccagttgaaggcgacgtttgctgctttcattaaacgcctgcgcgacggccaaggacaaaaagtgcaaggcgtcacagccaattatgccggtgattatgaaggcatcatcaacgtaaccgagggtgtgctgcttgaagatggcacggaagttacaccggacaaagcaacagcttgggtagctggagcgagtgcaggagcaacctttaaccaatcactcacatttgtagagtacgaaggcgccgttgatgtgttacaccgccttgaccacgatacgattgttgaacgtctgggcaaaggtgaatttttattcacattcgacgcccgtgacaaatccgtcagcgtagaaaaggacattaactcactcgtgacgttcacagctgagaaaaacaagaaatttgcgaagaacaaaatcgttcgtgtcctggatgctgtgaataatgatttaacacgcgagctgaaagccttaattaaatcaagaaaaggcagcggaagcgatatcccggcatctgaagacggactgcagtatgtaaaaacgatgatcacgcaatacatgacaacacttcaggatgcaggcggcatcactggctttgattccgatgaagatatcacaatttcaatgaatgaagatcgtgacggcttcttgattgacctggctgtacagcctgtcgacgcagcagaaaaattctactttaatgtggaggtaaactaatatggcattaaaagcacaaaacacaatctcaggaaaagaaggccgcttatttctcgatggtgaggaaatggcgcacatcaaaacatttgaagcaaacgttgagaaaaacaaatccgaagtcaacattatgggccgccgcatgacaggccataaaacaacaggggcaaatggaacagggaccgcaacgttctacaaagtcacatcaaaattcgtgctattgatgatggactatgtcaaaaaaggcagcgacccttatttcacgctccaagctgtgctggatgatcaatcctcaggccggggcacagagcgagttacgctgtacgacgtcaactttgactctgccaaaatcgcaagccttgatgtcgattcagaagcgttagaggaagaagttccatttacattcgaagacttcgacgtccctgaaaagctatctgacacgttttaatcaaagctgaatcagcccatacgtagacctttctcagaaaggtctgttttttaaagatgaaaccaaacaatagacaagggagttttttacatgagcgagaagaacgaaaacgtatatgatctttccttttttatgccgggaaaaacaattgaagctgaggaaatcaaagtgccgatctcaaagcgttttgttgataaaaaagggaatgtcattccgtttattttaaaaccaattactactgaacggattgatgaattagagaaagaaaacaccacatttaaaaatgtgaaaggccgcggccgcgtcaaagatttagactcccagcgcttttatgcgagaattgccatcgaatctactatttatcctgattttcgttcaaaagatttaagggaagcatacaaaactgcggatccggtagaagttgccaaacgtgtattatctgttgggggagagtatgcgaactggctgaataaagcaattgaaatcaatggttttgaagatgatcttgaagatctagaagaagaagcaaaaaactagtaaaggatggcgataaggaagctgtgtatttgtactatgcaatgcatgagcttcattactcgccatcccaacttcttgaattatatgaagcaccaaaacattttaaagctcttttatttgggttgataggttataagctagatctattagaaaaagaatcaaggagaggagggaactaatatcgcaaaattaacagcccgttttgatctcgaagacaaggtatctaaaaaactaaaacggatacataaaggattccaagaggtcgaaaaaaaagtcaaaaccattaatcggcaaatcaaaatcagtatcagagcggaagatcaggcattttaccggctgagaaaaataaacgactatatcattttgaaattcgcgaaatcgcttgagattaaagttgtacttgatgaccaagtcacatcaaagcttgatgcaattgaaagaaaacttaaacggctgccgaaagaaacgaagctgactgtctctttggtagatcggacagcagctgcgtataaaaaaataaagaagatgctttctaatcaaaagctatcattccttttgattccagatgacaaggttacttctacagttaaaaggattatcggttatattaagaaaaatttgaaaaacggatacacagtaaaactaaaggtcatcgatgaaatcaccaaaacagttaatcgattaacagcccttctaaggaaatttgaaaaaacctattatgtaaaagtggttgttaagacaaaaatatcagacaaaatcaataaaaaagaaagcccgattaacaaagaaacttctaagaaagaatcagacaaatcctcagataaaggctctgataaaaactcagatcaaaaacctggatgggtcggaaaaataaaaggctggctgaaggattggtggacaaaatcagcttggccttggatcaaagatacgctcaatgaaataggcaaagcttttttggatcgtttcaaagagagattgatagaaaagctgaaaaatgatgtgtttgataagatcattgataaaattctaggaccacaaaaaaaggacgattctggtgaaaattctgacacagataaaaaagtccttaaccgtaatacaggaggaaattgttgctgtgactgctgtgaaggcggtatcagcccgggcactaaaaataaaaaaacctatagaaaaaagaaaagtcccacaaaggctccaaacagaacactcaaggttcctggagaggtgataagaagacgtcaaagcggcacacctgctgaaagtgcacctaggacctcgggttccaagttaaagaactggcttggaggcttaaaatcgctagggaaggattcatccaaactaggtaaagcgttcagaggaatgggaaaggctgttccatacgtaggatctgctttagcagtgtttgatttagctggaatcaataaagataatgctggcgaaaaggttggttcaatcggaggacgcattgccggagcggaagctggtgcaacagccggagcggaagctggtgcaacgattggatctttcgttggtccggaaggtacagcaatcggcggggcaatcggcggaattggcggcgggttagtaggcggaatcggcggcgaagaagcaggtaagaacattggtaagatgtttgatacttctaagttaaaggagagcataagcaattcactatttaacaaagagtggtggagtggaaaatggaactccatttctgatactgccaatggggctattacttggattgaagatacatggagtaaagtttcaacttggtttgaccagtatgtgtttacacctatatataatgttgctgtacctgtaattaattttatagtaggattgtttgcctatgcatgggatggcatattggcagtatggaacattgtctacccgtggtttaaggataacgtgtgggatccaataagcggagcagttactaatgttgctacaacgatatggactggattgtgcaacgcctggacggttatttcaggcatatggtctactgtttcaacatggtttatggacaatgtgtggaatcctgtaagtgaagccgtaaccactgcggcaacatggatttggagtaagatcaatgatgcatggacaataatttccaatatttggacaggagtatcgaattggttttatgataatgtatggaacccgatcgtcaaaaaagtagaagatattaaaacttcaataaaagaaaaattcgatgatgcaaggaaattttttgaggatgcatgggatggaattgaaacttggtttaatgaacatgtgaaagatccattggttaaagtatcagagaaaattgctgagaaatttcaatggctattcgatttaaaagattcagttggtggtttcgttgcaaaagtaatacacaggggggaagaagttactcacctcaagaaaaaaccaatcaaaaaggattcgaaagagaaaaaaactagttccaaaccaactactaataacatttttgctcaatctccatcaaataataatatgactgtttttcaacaagcactagatcagaacgccacaggcggctacatcaccaaaccaaccatctcgtggatcggtgaagccggcaaggaattcgttatcccggttgataacaaccgaggccgggggaagatgcttctttcacaagcggcgtctaagctgggtatgcaagttgtagacgacatgggcgcagcttcgtcttctggcggaagtccagcatctgtttcaggaggagcagctgtcagtcctctatcaggcacagcctccccagtaatgaacactgcaaatcttacaggccaagcgtccacactcggacagcaattttcagaaggctttggtaaaggcatcagcgatcagccggtcaaaatggaagactggaaaaagaaaaacatcaatacgccatttacacaaatgatttctgcttcaccaaattacggtaaacaaatggtaagtgggtatgccaagggccaaagcggcactgcaaccggaacagacggctttttgcaatcaaaagttaaaacgccgttccaagccactgtgagcaaatcgtcttcatggggcacaggaacggtcaaaggctttgcgcaaggacaaaattcaacccaaacagggactgcacagtatgtgagtacacatgttgacaaaccgttcctgcgttcaaaagacacatcgaacagctggggctccggtttgattggaaactttgtgacaggcatgaattctaaatccagtgaagtaaaacaagcagcaaaggatatggccaagagagtggagcaggctttccgtgaagaattagatatccattcaccttctcgtgtcatgatgagcttagggcgttttgcctccgttggtgttgtaaaaggtctggattctgtcgatgtgaaaaaatatgctgaaaagcaagctggatcactggcagctgcttattccggaatgggtgcagtaggtggaaatgtgaagcagtggcttatggctgcaatgatggccacaaaaacaccattaagctggcttccgggattgatgacaattgcaaagtttgaatcaggaggcaaccctaacgccattaacctgtgggatagtaacgcgaaggcaggcaatccatcccaagggctcatgcagacagtaccaaccacttttaacgcacacaaagcgccaggcatgggtaacattagaaacccgattcataacgctgctgccgcaatcggctacatcaaaagcagatacggctctattgacaatgtacctggtattaaaagcatgaagcatggcggaccttatgtcggttacgcaaacggcgggctgattacaaaagaacaaattgcacgtgtcggtgaaggaaacaagcgggaatggatcatcccagaggaacgtggcatccgaggccgctacctccttcagagagctgcgcaagctctgggaatggaagtgacagatccgtctcaatcccagcagtctgagctttcttcaggacaagtttcagcagttacatccggtacacggcaaacgatacaaacagccggaacgaaagaaataaagattgagtttaacggagaccagcatttccataatggacaagacgccgaaagccttgcagcgaaaatcaagcaggcgcttatagatgaattgcaaaaggatatcaatattggaacgaagggagtcgttgcatttgactaaatccgtatatgaattttggatttcacaagggaaggacaagttgcggctccccgttcttcccgaccagctgaatatttcaaatacgattcagaatgagacggttaaagtagccaagttcggtgaccttacatttattgacgaacaaggagcgaaagaaatttcgttctcttcgttttttccgaagaaatacagcccaatagctgaatatcaaaccttcccgtcgccggaaaatgcgataacaaaaattgaaaaatggatgaaggccaaaaaaccggttcagtttttgattacgggaactaaagtgaatttaacatgcagtattgaaggtttttcctatagcgaaggccagcaggatataggtgatcgttcctttgatattcaattaaaagaatacaaaaccgcttccccgcggaaaatcaagcagaagaaaaaaacaaaggcaaaacgtccgtcgaaggctgcgccgaagacgtacacagtgaaaaagggagacacgctatgggacattgcaggcagattttacgggaacagcacccaatggcgcaaaatttggaacgccaataaaacagcaatgatcaaacgaagcaaacggaacatcaggcagccgggccactggatttttcccggccaaaaattaaagataccgcaatgaaacaggtgatgtatgatgatagaactgttcgtcattaaagacacagagtggcttgagctggttgcagaaagcgtatcgcttgaaggccatcgttatcaggcgccgcgttctattgaagcaaccatcgtcaccaagcagggcgaccagacgtattacagtgtctcagaaggagatacggtcttgtttaaatggaagggaaaagagctgtttcggggcattgtttttgcaagaaccccggacgagcatacgcttgccttcagcgcttatgacatgcttcagtacctggtcaaaaaccaggatatgtacgtgttttccaatcagcgggccgaccagatcataagaaggattgcgagtgacttccagataccgacaacctcgatcgcaaacacaggccatacgatcaaaagtcttgtcattaaaaatgatacgacattgtatgacatcatattaaaagcgctgaaacagacgaaaagccagacaggacgacattaccagctgtattcggaaaaaggaaagctcggtctgcgcgcttggccagatccgtcagaagtatgggtgcttgaaacgggcgtcaatatcacgggctaccaatacagcacttctataaacgatactgctactcgggtggtgcttcgccggcagaaggacaataagacatataaagcctctgccaaggacagttcaggcttaaataaatacggtgtgcttcaatatacggaaacggtcacagatgacatcaaccaggcacagcttcagcagcgggcagatgtacgccttgctgaaaaaaagggcgtgaaaaaagaactgaaaaatattcaggcagtgggcattccggaagtgcagagcggcttgcccgtctatatttcgattccagaggccggcatcaagaaaacctattgggtagatacggaccggcatgaatttaaaggaacgaaacatacgatgacgatcgatgttgtcgaaaagaatacgatgccggaaggagtatcctgatgagattaagtgaggctataaaacatttggcagtcggcgcaattgacgctgagtctccggtagaactgctcccggctgaagtcgtttcggtttctcctgtggaaatcaaattaaaagaaaacagcaaactgatcataccggaagacgccatcattatcccaaaacgaatgcagtccggaggagacgatgcactcgaaccgggggatcgcctcatgaccgcggctctgactggcgggcaatcgttttttattttagataaggtatagacaaaccgcttcagtacgaaggggtttttatttagcatgtaaaaggagtgggcatcatggccctgacaccagaagtggagtttgaagatattgaagatgtgagtgaaatcattgaaacctcgcaaacgtacaaaatagattttgaaaacggaagaattacgaatgagctgattaccgggcttgaagcgatcaggcagttcgtgtatatcgccttacagacagaacgctatgcgtattccatatacagccataatgtcggaaacgagcttcaggacgtgctgaccgatcatgagacaactgatgcctataaaaagatggagatcccgaggctgatagaagaggcgctggtttatgatgaccggatatcggctgtaacagattttgagattgaaaaacaaggcgacgcgtttcatgtgtccttcgtggtggagacggatgaaggaacgcttgagattgaggaggtgattggcgaagatgtttgaagatcagacttttgaagcgattatggagcgtatgctgaacagcatttccgcagatattgacacaagagaaggcagcgtcatttataatgcgttagccccggcggcggccgagcttgcgaagtcttatatatggctggatactgtgcttgagctagttttttctgataccgcacaaggcgaatttttagacaggcgtgcagcggaagcgggaattgaaagaactgccgcgacaaaggctgtcagagcgggagagtttacatctggagttactattcctgtcggctcccgcttttacgtggataatctttattttcaatatacggcagacgggacgctcatctgtgaaacacctggtgaagcaggaaacgccaacctgaccggacgcaatttactgtcattggataccattcccggtttagaaacggccattgtcaaagaaatcctgattccggggcgcgaagaagagggagatgacagcttgcgagaacggtattttacaagggttcggcgtgaggccgtcagtgccaataaaatgcattataaagagtgggctgaggaagtggacggtgtgggaaaggcaaagatcttcccgctttggaacggtgaaggcacggtcaaaattgtcgtcaccaatgcgaatcttgagcccgcttctcctattttaattcaaaaagtgaaagattatatcgaccctgaaccaggacagggagagggacaggcgccaatcggagccgttgtcacagtggagagcgcggtctggaaagaagttgagatttctgccgaagtgctgcctgagatcaatcactcaattgatgaagtgaagtcagaaattgaggaaggcgttttaaatctctttaagaaaatggcgtttgaagataacgtcatccgcctttctcaaattaacaatatcgtctataattcaccatcagtcagtgactactccaatattcaaatcaacggcacgtctgaaaatctggtgttgagcgacgtggaaattcctaagcttgggcaggtgaagatcattgagcaaacaagatgacatgcgagcttatctgccgccgtttctcaccagccttaaagaaatggctgagctgctgaaagcggaagcgcctgagtttgataaacaaaatgacagcatatttgatctgacggatcagttattcgtgccgacggcgacatgggggctcagccgctgggaaaagattttaaacgtaccgcgggaatcaggtgacactgatgagatcagacgattgaggctcatttccaaaatgtcgaacatcccgccaatcacatacagggccattgagcaggcggtaaaccgtttcttgaaaaacccgtctgcacaggtccgcctgattcccggcgaataccgatttaacgtcgatatcaatgttgatgacctccagcacatgaatgagctgatcgaagcgatagaaaacatgaagcccgctcatttggcgtatacgctcagaggcggattgaacgagacgctgcaaatcaaagacacagttatcctgaatcatcgcagataccgaacagccagtgagctcaaggtcggttattctgtcactcttaacaataatgaggtggtcttaacttgatttcaaccatatacagagaacgcacagcggctgatctaaaaagcagaatcgatcacgtgctgctcaacggccaaaaaacagaaatagtagatctcaccattgacggtgcgaccgtcaccattctgacaaaacgtgaggaagacatcaagcatatcgaaacggtacaaatttttgacgagctgggcaatgtgatcacagagagaaagactgacctggacgtcagcgaaaacagaacacttgatttcagatttacttttgaggtggtgtaaacatggcatacgaagaaaaaacagactggcttccggacgaccccatcaacgaagatgacgtcaaccgctgggaaaaaggaataaaagacgcccacaccgacctggccgcccacaaaaacgacatgaacaacccccacaacacaacgaaggcgcaaatcgggctggggaatgtggataatgtgcagcaggcggcgaagaaggattttgacaagcatgtgaatgacggtacgattcacattactgctgctgaaaggtcaaagtggaacaacgctcagttaagtaagatatcaggtgatgatggaagggtcttttacaagagtgtgaccgaaattactgattataatgatttaaccgatactggtatgtacttaatatacaatgacggcttgaagggtccgggcctaaatcagtgttttctccttgtgatgagctataaaaacacacttgttcaaatagcttatgacggaattaagggagagcagtcattttttagaataagaaaaaacgattctacaacatggacaccatggattgaatcagaaactacagaggggtctcaaaagaaaatagatgcacatgctaataaaacagatatccacgtaacaaaatcagataaagacaagtggaacgactcacagctctttaaaataactcaggataacggtctcgcaaagtactgtgaagatgcagatttcaatactgtcatcgaaactggattctattacatgagtggtgcgacaacaacattaaatgctcctgttaataacaatggttatttaatggtttataatttcagcacgtatgcatatcaagaatacacgtcttatagcagtagtgacacaatatcaactggccgaaggaaattcatgaggaataaagtggctaactcagacgtttggacatcttggcgtgagatcgaatcggttgaaggctcacagatcaaagtagatgcacatgccaataaaacagatatccacgtaacaacatccgataaggacaaatggaataatgcacaactatatagattaacagatactcaaggttgccgaactaaaatcccagatgggactgacttgttaacactaccctctggcttttactatgcattagggaacgtcataacaaataatcctgtttcaggagatggatcatggtataactatgatgttatcgaaacagagggaggcggacgaaaaacaattttggcctctagaagttatgacggaaccttttggacggcaacgatccatacagacggcgtgtttaaaggctggaataagatcgagactgaggtaagtgctcaaaccaaagcagataaagcgctagctgatgctaaaaactatgttgactctaattatacgaataataaattaacagttcttacaggctctaatgcaatacaagacgcaagaactggggggaatgaatatcctccagggttaacactaatggatattggtcaaggaaatactacaggttatccacttggttatggaattgtaaaaaatgagaaatacagtgattttagatttactcaatatttttacggtacaggaaatgaatcaaatagttatattgatagtactggaacgtgggttcgtcactggtggagtggttccggctggactgcgtggcaaaagatatcagggtttgctcacgctaatattgggactactgggcgtcaagctcttattaaaggagaaaataacaaaattaaatataaccgtattataaaagatagccataaattgtttgatacaaaaaacaataggtttgtagccagtcatgcaggaatgcatttagtcagtgctagtttatatatagaaaatactgagcgatactccaattttgaattatatgtttatgtaaacggcacaaagtataaattaatgaatcaatttagaatgcctaccccttccaataacagtgataatgagtttaatgcaactgttactggatctgttacagttccgcttgatgcaggagattatgttgaaatttatgtttatgttggttattctggagatgtaacacgatatgttacagattcgaatggagctctcaattattttgatgttctggagcttggcggaagaaattacccgagagtttaggaggtacctttatgatcttatatgatgccattatgtacaagtatccaaacgcagtatcgagaaaggattttgaattgcgtaatgacgggaacggttcatacattgagaaatggaatctccgggcgccgttgccgactcaggcagaactcgaatcctggtgggaggaatcacaaaaaaacccgccgtacgagccgcctgatcaggtggagcttctcgctcaagaattgtcacaagaaaagctggcacgcaagcagcttgaagaactgaacaaaactttgggaagcgagttgtcagatataaagctttccatactttctttgaaaggagattactctgaatgaattattgggtgcttgccctctattatgagtgggcgacaacggatatggtgaaacaggccttagcatatcaagactgttcaattgaggatctggcagagggtgtgaacaaaaagctgatcacagctgaccagtataaagaaattaccggtaaagccatgtagtaaggcttttttattttgcctgtttttagatcaaaggaggatgaagatggtgaagtatcaatatgaatttcctctcgataaggctggaaaagccggcgctgtaaagccctatcgaggaggaaaaaatgattttgtgacacctgtttcgaatttgtcaggcgtagcggagattttaacaaatgcttccttaaaggcgactgaggcatacagtcagctcgggcaggacaggcttggcgcagttctgatttcgaaagtgaagggctgggcgtatgcagatcgtgaaggtacgctctttatagaagaaagcgacaacaacaatgtttggacaacgacagcagcagttaatgtcgcagcaggtgtcctgacagcgacggactgggtatacctttctaaacgctattaccgtttccgctatgtgaacgggaatcttcagcaatctgagtttgtattataccaatcagtcggtgcgggtgagatggatgtgcgtgtcaatggaaaaacgcctttacagattgactttgcggagaatcaaacacacgatggacggctgaaagtcgaggctcgcaaaacatttgactttgtctttcatgaaaatgcagagtccgccggcgagggtgcttctttacctgttgacggtgccgcgcatttactcgttgaagtatatggcacagcggaaatgagcgaagtcaaattttggggcaaatcggtgtcagggcagaaactgccgatcagaggcgtgaaaactgatgatgccacctctgctttgagtacattaggaaaagctgaggcatgggccttcgatattaaagggtttaaggagatcatcatggagatcgtcagtatcaccggcggtactctctcggtaaaagggaccgctgtttcataacagttttggctctcggaagggaggtgatctgcatgtgaaggaggagtgaataatgcagcaagaggcagatgtgaatgtgtttcagcaggatttagcagacatgaaaggcgagcacaaagcacttgagcagagggtttccgcattagaacgcgtgtctgaccgtcaagaccagcaaatcatgacgctgaacgaaaaattaaacaaaattgaagaaaacactacgtggattaaacgcaccatcacaggtgccatcattacagcagtgtctacaggcatcattggcggagccatcgccattatgtacagcctgctgcagcattaaagggggattttcatgaacacgtttgacaagggcacggtcatcaggacggtgcttcttttaattgctttaatcaaccagaccatgctgatgctcggcaaatcaccattggacatacaggaggagcaggtcaatcagctcgctgacgctctttattcagccggttccatcgtatttacaattggaacgacacttatcgcttggtttaaaaacaactacgtaacagaaaaagggaaaaagcagcgcgacgtgttaagggacaataatctgacgaaataaggagagatgaaaatggttaacattatccaagactttattccggttggcgcaaataaccgtccaggctacgcaatgacgccgctttacattacggtgcacaatacagcgaataccgcagtaggagcggatgctgcggcccatgcccgctatttgaaaaatcctgatacgacgacaagctggcattttacagttgatgatacagaaatttatcagcatctgcctttgaatgaaaacggctggcatgcgggagacggaaatggcagcggtaaccgggcttctatcggaattgaaatttgcgaaaatgccgatggcgattttgaaaaagcaacagcaaatgcccagtggctcatcaaaacattaatggctgaacataatatcagtctcgccaatgtcgtccctcataagtattggtcaggaaaggaatgtccgcgaaaattgttagatacgtgggattcgtttaaagcaggaattgggggaggcggcagccaaacttacgtcgtgaaacagggcgacacacttacatccatagcgagagcatttggtgttacagttgctcagctgcaagagtggaacaatatcgaagacccgaatcttattcgcgttggtcaagtattaattgtaagtgctccatcgtccgctgaagaacccgagctctatccgctccctgatggtatcattcaattgacaacaccttatacctcaggagaacacgtctttcaggtgcaacgagcacttgcggctctgtatttttaccctgataaaggcgctgttaacaacgggattgacggcgtttacggaccgaaaacagctgacgcagttgcccgttttcagtctgttaacggtctaactgctgacggtatctatgggcctgcgacgaaagcgaagatcgcagcgcaattaagctgatcacagaccataaaaatcccggagctgctccgggatttattttttcttcttcaactttttaataattccagcactgcgctccctcacccgaagcgagtacccggaaagcccaaaccttccgtaatcaacaaacttcacacgcctcaccaattttttcactgtatcacctgacattatcctctgtttgtatttattatatgtaaccctttaagaaaaggaataaggacaagagctgttttcccttgtccttttagtgtgatcatgctttttttcgtttatactcgtcaatcagccgttcgttttctttgaagattcttgctgtatgcggactgacttgatagcttgcgacactggtggttgaacgttttttcaggattttaaacggcttcgccgctctgggctcgcatctgttttgaaacgcacgttccattatccttcaccttcctcctcaattggcagcaccaaatcatatatgctcgttaatgacgtaaatagcaaataatcaaattccgtgacaatgctgtcagacgtcagcttgatgacatagttctgtgtctcgatggtaaaagggatgagaaccacttttccgtattggtcgtaataaacatcctttcgatcgagccgtgtttgtacatctgccggatcatccatatgctcggttaaccggtctttatcagcctgtgtcgaatagtggcaaagagaagccgttaagttcattttatcagcataggttttcagcagcttatcaataccttcagcataagcatctatacttccataataaacatggatcggctcgtttttcaataggtattggtatgttttcagccgattgagatacatgtggagcatttcgttgttttcttcaagaatttctcttgtgtctgtttcaagctcgctgccggccagttttttgacgtatgcacttaagaagataaaagcatcaatcaaagcaaaactgactgcgacaatgagataccgttcccagtgggtaaatagggaagtgggctcatatgtccagtataccatagcgcctagaacaaacagcaaataccaagttttccggatggcggacattttttctttgaccttcgcttcgaaacgccacgtggcatatacgtataaccccagtccggccacgatgcaccagaccatgatctgaaagaataaaaccatattcgaatccctcacatttgaaataggttctgcttattgtattcgagagatccggatggttttcctgttccatcaaaaaaaccgctcctttgacagaagcggtgtgacattaaaatatcatatttaaaataaagtaggcgatggcaccaagtgtcgctgaaatcggaagcgtgatgacccatgtaatgagcattcgcttggccgtaccccagtttacaccttttacgcggtgggacgcaccgacgccaagaattgatgaagaaatgacgtgggttgtactgaccggcaaatgaataaacgtggcgccgaaaataatggctgctccggttaagtcagcggaaacaccgtttaccggacggattttcatgatctttccgccaacggttttgatgattttccagccgccgattgatgttccgagacccatggctgtcgcgcaggcgaattgtacccaggtaggaatatcattagcagaagtatgtaaattcgctgtgatgagagccattgtgataattcccattgctttttgcgcatcgtttgttccgtgtgtatacgattgcagggcagctgttacaatctgcactctgcggaattgcttattcgttttcgccaagttgctgtctttgaaaatcagcttaacgatgctataaagaataaaaccaaggacaaaggcaataattggtgataggatcagtgcttcaatgattttaatgaagcccttatagtttaacgctgcaaatccggctgccgcaatggctgcaccggcaatagcgccgatgatggcatgggatgagctgcttgggataccgtagtaccatgtgataaggttccaggcaattgcagcgagtagcgcagccaaaatgacaacagagccattttccagcgtataaggatctacgatgtctttcgtaatggttttggcaacacctgtaaacgtcattgctccgacaaagttcatcacagccgccaatataatggcatggcgcggttttaacgcttttgttgataccgaagtcgcaattgcgtttgccgtatcatgaaacccgttgatgaaatcaaacgccagagcacaaatgactattagtatcgttaatattaatagaatatccatttttacccctcgttacgcgtttttcataatgatggtttcaagattattggcaacactttgacaagagtcggcgatttcttcaagcgtttcgtatatttcacgatattgaatgactttgattggatctgtttcatttccgaaaagattctttaatgattttctgtgcaagttgtcacagctgtgctcatactctttaattttgattgcgtgaggctgaatatcctttaagcgattttctgccagcagctcgatcgtaatcaaaatctctttcgcacattctctgatatatccgctgaatttatcaatatgctcgtctgatgaagtaattgagaaaatctccatcatggcagagaaatgttcgattccgtcaagcacatcatccaagctgtttgtcagctgaaggatatcttcgcgctcaataggagtgatgaacgctttgttaagctctttaatcatgacatgaacatgattgtcaccttttgtttcatattcctttaacgtatctgcaaattctttaagagtcgtttggttagtgaccttaaaattcacaaaatattctgcagtttcgtctatgttctttgcaatttctgttaaaaggagtgagaacttatctttttttcttcttatcattaaaaaccctccatagtttgaatgaacaatgcacacatcaaattattatatagccttttgtcgaaaaaaaacaggtaaagtcgaaaaaaacgtatcttgacttttttgataaatcgtgtctccttattttgacctacttcgctttaaaaaaacgacccaagtttgcaaaaactttctgcttaacgtaaaaagtatatcaaaagttgtgtttttcctgtcaacttttatcttctgtttcaccaaaaaacggttccctaaacaagggaaccgttttatcagcttgcttttcgttttttcatcccgtaatagacaggcagcccggcaaggccgatgaggatggataatccgcagctcattgtatctgtaatgagtgtgctgcctagcacaaagaaggagcccgcgattgccagaattggcatagatggataaagcggaacactgtaggcgcgcttttttccctttgctcgcttgcggagaataaacactgcaaaaaaggccatcacataaaaaatgtagatcatgaaaatggagatttctgagagcttatcagggttgctgatcagcatcataatcaaagccaaagcaatttgaaaagaaatcgcaatccatggtgtgcggaacgacgggtgcacatgtgacagtttttcagcaaatggaagctgtttgcgttccgccattgcaaatgaaacacgcgggaaagaaagcacctttccatttaagcacccaaagatgctgacgataatccctacactgatcagctttccgccaattgacccgaacagcatggttgccgcggtgcttgtcgcattttcaccaagcgtgacaatttcgttcgctgacaggatgtggagcaatgcaaaattaatgaaaatatagatcgctgttacaattaataatccgcccgtcatagcgcgtggcagcagcttttcgggatttttcatttctccgccgagagcggcaaggagaatccatccgtcataagcaaacaacgtagctaaaatagccgccccgaagttcatatcggaaatgctttcgtttactgctgtgaagatgtgctgatcgcctttccaaaggccaaagatgatgatgcaggcaatcggaatcagttttccgatcgttgtcagcgtttggacaaaaccgccatattttgtaccaataatattaatgacgcataaaaagagaactgctatgattccaatgacttttgatagtccagatccccagccgaaaagattcgccattaaagatccaaaatataaacccagcgcgccaataatcgccgggccgtaaatgataatctgcacccagccgcacaaaaatccccaaaactcgccgtacacttcttcaaggtacgtataaagaccgccggtttttggaatctgcgttccgatttccgcgattgtcaaaccgcccgccagtgttaaaataccgcctaacagccaggcgaaaagcgctgtttttgaatcacctgaataagcaagcacagcgccgggcttcataaaaacaccagaaccgataatggttccgatgacaagagtaagggcaaacaagaggcctatctcttttttcaaaccgttgtcttcagtatgcatgtccttaacctcctatgatgttgaagcttcatgttgaagaatctattttttcatattgtaaaccctattttagaaaagtgaaataaaataaattttctgattttcgaaatttgctttgtgtacagcaaataaaactgtaaaaacgcttgttttaacaatctataaacgaataaacttcatgatttttatttgcaaagttcgtgttttctgtattaggattttagccggtacggaggggagaattcagaaaatgaacgaaccttcggtgaagctgatatgttgactttctcatgcgaataaaatactttgttattagaacaataaatatacaactatgatatgatatctcgaaatcgagataaaataacctggagggacagcgtatgaaagttaacggcattcaccacgtatcggcattaacggccgacgcacaaaaaaacttggatttctataagaaagtattaggattaaagctcgtcaaaaaatccgtcaatcaggatgaaccgacaatgtaccatctgttctacggagatgaagtggcaaacccgggaactgagctgacgtttttcgagattccccgcattgcaccgtttcatgcgggaacaaacagtatttcttctattggattgcgcgttccaagcacagaagccctgcattactggaaagaacgttttgaagcgcagcaagtaacgcacagcggtatatccaaaagagctggacgtgacatattggcatttcaagatcatgaagggcagcgacttgtgctgactgctgatgaggaaggaaaaggatatggcctgcctgttaaacagagcggcattccggaaaaattttcgtttcgcgggttagggccggttgaactgactgtgccatatgctgaaccaactttacacgtattgacgaatattcttggatttacagaaatcagccgtgaaccagtcgaagggcaaggaaccgccgttattctggaatcaggagaaggcggtgctgcaacggaaatccatttaatagaaagaaacgatcttccgcgcgagcgtcaaggcaaagggagtgttcaccacgtcgcatttcgggtaagagatgaagaagaacttgccgggtggcaccggatcatcagccgcgaaggctttagcaattcaggcatagttgagcgctactatttcaaggcgctgtatttcagagaaccgaacggcattttgttcgagttatcaacagacggaccgggctttatggtagatgaaaatcttgatgagcttggccaaacgatcgctcttccgccatatcttgagcatcgaagagctgaaattgaagcgaaattgaaaccgatccaataaattgtgattcatttgccctccggcgcgccggagggcttttttattttgggaaaacgcatcgccgattacgatttggagaaagggctagaaaccagctgtatataggatgattggcatgaaatggcctcggcaaaaatattgtctttgtttattaatagtttattcatatttgcttgttacactatttccaagttagccaaaaggagtgaaaaacacgtggaaaagaaaaaacgcgagctggatattttcctcatcctcattttgctcgcatctgcattcttaaatatctataacatctggaatgatgatacggtgaatccttattacaccgctgcagtcacaagtatgatgcaaagctttcataattttttctatgcctcattcgacgcggcggggtttataacggttgataaaccgcctattacgttccagatacaaaccatcagcgcacttatattcggtatgcacggctggagcgtcatcctgcctcaggcacttgctggtgtaggttctgtccttttaatgtatctgttaataaaaccgacattcggtaagacagcagcaagaattgcctctttcatcatggcatgtacaccgattgctgtagctgtagcacgtacaaacaatgttgatgcattactggtatttttcttattgcttgctacatggcttctctttaaagcgatcagaaaaggaaagctgatctggctgttagcagcatttttcgttgttggagtaggatttaatacaaaaatgctgcaggcttacatgattttaccggctttcttattgttctatctgattgcggcaaacgccacaatcaagaaaaaaatcgtttcattggtaagtgcgttagccgtattagcagccgtttcgttatcgtggccgctcattgtcgacaatatccctgcaagcaagcggccttatatcggaagcagccaaaccaactctgttttggaattggctttcggctataacggaatccagcggctgacaggccaaaattcaggcggcggccagggtgcgccaaacaaagacgcttcaaaagaaatgtcttcttctgataacactcaagcaccgcctaatcagtcatcaagcaacagctcatcaagcgatggtaaatcctcaaatggcaatatggcggcgcctccatccaatggccaaatgccaagcggcggtcaaggaggccctccaagcggcggagatggcggccaaggcggacccggcggagacggagggaaaggcggtacaggaactggttcgaaaatgcaatcaggttcagggatgtttggaacgggaacacctggtccactgcggcttttccaacaagagttatctgatcaaatcagctggcttctgccatttgcgatatttggaatcgcaggcttactgatcgctggcgcgagagaaagaagaagattatctatagagcagaaggaaacggtgttctgggttgcgtggcttgtaccgattgccggattcttcagtgtcgcagaatttttccatcattattatctcatcatgctggcaccgccgattgcggctcttgtcggtgcggggtgggttgctcttgttcatctgtaccgcaatcagacaggctggaaagcatggcttttgccgggagcaattattgcgacaactggatttgaattgtttattctcagaaactacaacgatcaaatcggtgcaggctggagcatcggtgtaggtattatcggcgcattgtcagcgattgctttgctgctgtttaaacagcgccaaaaaccgttcagttattatgtttcacttgcagctctcctcgcattgctggtgatgccagtttattgggcaagtacgccacttctgtacggaggcaacagctcactgcctgaaacaggccctcagctcgcatcaatgggcggaaaaggcatgggaatgtctgatgcgactgtaaatgaaaaactgatcaaatatctagaggagaataactccggagctgaatacctatttgccacaaccgattcgaacacagcggcaccatatatcattaaaacgaaaaaagctgtcatggctattggcggatacagcggttctgacccggcgatcacactgactcaattcaaaaaacttgtaaaagaaggaaaagtgaaatacttcttggcttctggaatgggaagaggcggaaacaatgacattgttgaatgggttgagaaaaatggaaaagaagtagcatcagaaaaatggcaatcaagttctgatcaaaaaacagaaaatactgattcggctgatacatcaagcagcaaggcttcaggtgaaaacggcaaaatgggcggacctggcggaatgaatcagtcagcaacattatacgaactacatgctgataaataggaggcaaaaacatgagcagacatattcaatattcaattgttgtacctgtgtataatgaagagcttgtcattcatgaaacctatcagcgcttaaaagaggtcatggatcaaacgaaggaaaactacgagctgctttttgtcaacgatggcagtaaagaccgcagtattgagattttaagagagcacagcctgatcgatccgagagtgaaaattattgatttttcaaggaattttggacaccagatcgccattacggcgggtatggattatgcacaggggaatgcaatcgtcgtcattgacgccgatttgcaggaccctcctgaactgattttagatatgattgaaaagtggaaggaaggctatgaggtcgtgtacgccgtgcggactaaacgaaaaggggaaacctttttcaaaaaacaaaccgcggctatgttttaccggcttctcagcggtatgacagatattgatatcccgattgatacgggggattttcgtctcatggacagaaaagtctgtgatgaaatgaagagattaaaagaaaaaaatccatttgtcagagggctagtcagctgggtgggctttaaacagacagcggtcgagtatgtacgtgatgaaaggcttgccggagaaacaaagtacccgctcaagaaaatgctgaagctgtcaatggacggcatcacgacattttcacataaaccgctgaagctggcaagctatgcggggattttaatgtcaggtgctggatttctgtatatgtttatcgtgctgtatctgaagctattcacagacagcacgattaccggctggtcatcacttattgtgatccagctcctgttcagcggcattgtccttctgattttgggcgtgatcggcgaatatatcggcagaatctacgatgaagccaaagacaggccgctttacatcgtccaaaaatcgtatggaattgaaaataaaagactctatagagaccagcatatgtcataacctcaaaccccctgtccgtaatggacaggggtttttatgctctgagcccgatctaaagcaaaagatgctgatagatatatggaaattgggtaaagaagagattgtgagcttgtactgcggttcagtcatgccgaaataaaaacagcaaaacttaaagatttcgtcatcggctttgctgcatgtcagctgttatattggggggcttttaagaaacgcatgattagagccgtaccagttatgtttaatagaatactggtacccaatacaattccccacgtcaacgtcgattcagagagaagaaagctcagtaaaagaaaagccaatcctgcgcagatcatactcagtcccacggttttcatgttcatgcctcctagcaaacgatgtttctagcatctgatgtgaatgatgtcaatctgtatgatatacggatatctcgtcagaaagtttcatagagcaattaggtcttttatctaataaaaagcctcagaccgcttttacggcctgaggcattatgtcttacgaagttttctcttctttttgatccagtttaatttttttcgtcatttctttgccgtttcggagaattttcacttcaacggtatcaccgatctttgcgtctttatataagatattgcgcaattcactgcctgtatcaatttctttaccttttaggccgatgataatatcctccgcttttaatccggccttttcagcaggagagcctgaagcgacctcacggatgtaaacacctttattcagctggctgccgaacaggccgagtgtgccttcttggtaattttgcggcacttgttctagatcaagcatgctgacaccgatatatggacgttcaatttgtcctttagacagtaattcttcagcaatcggttttacgtcattgcttggaatggcaaatccgataccctcaacatcatcttcactgattttcatactgttaatgccgacgattttgccgtctgtatttaacaaaggaccgccgctgttacctggattaattgctgcgtctgtctgaatgacgttaatgctcgtttcgccggctgatgtagacattgaaaccgttctgtccacgccgcttacaattccttgtgttactgtgcgggacaggtcttttccaagcggatccccaatcgcaataacggtctcgcctgttctaagatcagatgaatcaccgaagtttgccacttttgtgacgtggtcatcactgatttggaggacggctaaatcagttaacgagtcactgcctaccagctttgcagtaacctcagtgccgtcatataaagataccttcagtgatgatgccccttctacgacgtggttatttgtaatgatataagccttgccattctcttttttgaaaatgacacctgaccctgaaccgctttctgtatcttcgctggaatcagaagaactagagccgaacaaagagctgtttgattgtgcctgaagatttgtaataccgacaatcgctggtgaaaggtcttctaccatatctgagattttagaagagtcctcgctcttgaatgcagatgagctgcttgagctttttttagattcagaggaggtgcttgttgctgtaacagattgcgtttgctgctggctggatgattgttttgcagtgtcctgagaatcatggtcgccaagcggtgtaaacgtgtaaatgccaagggcaagactgccgccgatcactccgccaagcaacggtctgaaccatccgaagcctcgttttttcttctcctgatcatgaatgacattgcgggccgagtaggaggtgctctgatcgttctctttcgttaaaaagacctcattctcattacctttcgttctgttttcatcacgatagttatccatcatgttcactccgtttctctattttcacatgtctatttatattgataggtttatgacttgagtttatcataaacaaaaactgtgggataaaaatgaaaagattatgggaaattgtgaaaaagtgcggaaaacggtacacttcatattgtatatgaaaggactgagtcgatggaacagattggattgattggatatggcagcatggcggatatgatcgccagacagctgttgaaacatgaacaaataaaagagaatgagctatttattgagacgagaacgaagggggagcggctgcgggcactcatgtcagattatccaaacgtatcggctgatccgttggagaattgggcaaatacgtgccaattgattttgatatgcgtcccgccgctccatgtcatcgaaacaatgcgccgtctgcacccgtatgtgaacagaaatactcacatcgtatccatagctgccggtgtgccgctgcgtcttttggaggcagaaacagaagccggtatctcacgtgttattcctgccattacgtccgaagcagaagctggcatctcacttgtcgttcacagtgaagcactggctgcagagaaaaaagaatatctgaatgaattgttatcggttttcagccgtgtacgagaaatcaaagaatcgaatttagatgcggccagcaatttaacgagctcggcaccaggattcatagccgcaatctttgaagaactggcactgtctgccgtcagaaacagcagcctgtccaaagaagaagcctttgattttctgattcattcgctatacggaactggcaagatgctgatcgaaaaaaatatgtctttcgaggagacgctggaacgtgttgcaaccaaaggcggaataacgggagagggagctgaggtgatacgcgcctctgtgccggacgtttttgatgaggtgtttgaaagaaccctgaaaaaatatgaactgcttacagaacaggttggtaaacagacatgaatccttgaaagaggattcttttttattactgaatggttgagattttccccagttatattgcatttttcctctttttttaatataatctgttagaatattcataatttagtaaaaaaggaggagcgttatgaaattgtacatgtcagtagatatggaaggtatttcgggtcttccggacgatacctttgtggattccggcaagcggaattatgaacgcggacggcttatcatgactgaagaagcaaactactgtattgctgaagcgtttaacagcgggtgtaccgaggtgctggtcaatgacagtcattcgaagatgaataatctgatggttgaaaagcttcaccctgaagcagacttgatttctggtgacgtcaaaccattttcaatggtggagggactggatgatacgtttacaggcgctttgtttctcggttatcatgcgagagcctcgactcccggtgtcatgtcacacagcatgattttcggcgtccgtcatttttacataaacgatcggcctgtcggtgagcttggattaaatgcatacgttgccggttattatgatgtcccggtattaatggtagccggggatgaccgggcggcgaaggaagcggaagagcttatcccgaacgtgacgacagccgcagtcaaacaaaccatttcaagatccgcagtgaagtgcttgtcccctgcgaaagccggacggctgttgacagaaaaaactgcgtttgccctgcaaaacaaggacaaagtcaagccgctcacaccgcctgacaggccagttctgagcattgaattcgccaattatggccaagcagaatgggcgaatctgatgccgggaacggaaatcaagacgggaactacaaccgttcaatttcaggcgaaggacatgcttgaagcctatcaggcgatgcttgtcatgactgagcttgcgatgcggacatcattctgctaaaggggtgttttaggctttggcgcgatacatgataaagcgtttttgggcaatggcagctacgattttggtgattaccaccctgacttttgttctcatgaaggtcattcccggatctccttttaacgaggagagaggcacaaatgaagccgttcaaaaaaatctcgaagcctactatcacttagacgatcctctcattttccaatacattttctacttaaaatccatcattacattcgatttcggaccttcaattaaaaaaccgtcggacagcgtaaatgatatgctggaacgcggatttcccgtttcctttgagcttgggatgacagcgattgtcattgctgtgatttctgggctggtgctgggcgtaatcgctgcactccgccgcaatggctttttggactacgccgcgatgagtcttgcagtactcggcatctccatcccgaattttattctggcaacattgctcattcagcaatttgctgtcaatctcaaactatttcctgctgcgacatggacgagcccgattcatatggtgcttccgaccgcagcgcttgctgtagggccaatggcgatcattgccaggctgacacggtcgagcatggtcgaagttctgacacaggattatatccgcacagcaaaagcaaaagggctttctccattcaaaattatcgtaaaacacgcactcagaaatgcactcatgcccgtcattaccgtcctgggcacactcgtcgccagcatcttaacaggaagctttgtcattgaaaaaatctttgccattccgggaatgggaaaatattttgttgaaagcattaatcagcgggactatcccgtgattatgggaacgaccgttttttacagcgtcattctgattatcatgctgtttttggtcgatttggcctacggtctcttagacccgcgcattaaactgcataagaaagggtgaagcgtgtgaatctccctgtacaaacggatgaacgccagccagaacagcacaatcaggtgcctgatgagtggtttgtcttgaatcaggaaaaaaatcgggaagccgattcggtcaagcggacgagtttgtcatacacgcaggatgcctggaggaggctgaaaaaaaataaattagcgatggccggactctttattcttttatttctttttgtcatggcagttatcgggccctttttatcgccccatagtgtcgtacgccaatcgctgacagaacaaaatcttccgccctcagccgatcattggttcggcaccgatgaactcggccgggatgtgtttacccgaacatggtatggcgcgaggatctcgttgtttgtcggcgtgatggcagcactgattgattttttgatcggtgtcatttacggaggcgttgccggctataaaggcggcagggttgacagcattatgatgcggattatcgaagtactgtacggcctgccgtacctgcttgttgtcattttgctgatggtgctcatgggaccgggactgggcacgattattgtggcgctgactgtgaccgggtgggtcggcatggcgagaattgtaagaggccaggtgcttcagattaaaaattatgaatatgtactcgcctcgaaaacctttggcgcgaaaacctttcgcatcatccgaaagaatttgctgccgaatactatgggggcgatcatcgtacaaatgacattaaccgtacctgccgccatattcgcagaatcatttttaagctttctcggcctcggcatacaggctccgtttgcaagttggggcgtgatggcgaatgacggcctgcccacgattttatctgggcattggtggcgcctgttttttccggcctttttcatatctctgacgatgtacgcgtttaatgtgctgggggacggattgcaggatgcgcttgaccctaagctgaggaggtagctgtatggaaaaagttctgtcagtccaaaatctgcacgtgtcttttacgacttacggcgggacggttcaggcggtcagaggggtgagctttgatttgtataaaggagaaacctttgcgatcgtcggcgaatccggctgcggcaaaagcgttacctcccaaagcatcatgggcctgcttccgccttattcggcgaaggtgacagacggcagcattctatttaaaaacaaagacctttgccgtctctctgacaaagaaatgagaggtataaggggagccgacatttctatgatttttcaagacccgatgacggcgttaaaccctacgctgactgtcggcgaccagctgggggaagcgctattgcgccacaaaaaaatgagcaaaaaagcggcacggaaagaggtgctttccatgctgtcattggttggtattccagatcccgaagagcgcctaaagcaatatccccaccaattcagcggcggcatgagacagcggattgtcattgcgatggcgctgatttgcgagcctgacatcttaattgcggatgaaccgaccaccgccctggatgtaaccattcaggcacagattttagagctgtttaaagagattcagagaaaaacgaatgtgtctgtcatcctgattacacatgatttaggggtcgttgcccaggtagctgacagagtcgcagtcatgtatgccgggaaaatggcggaaatcggcacgagaaaagatattttttatcagccgcagcacccttatacaaaaggactgctggcttctgtcccgcggctggatttagatggagcggagctgatcccgatcgacggaacgccgccggatttattttcgcctccgccgggctgcccgtttgccgcccgctgtccgaacaggatggttgtgtgtgacagggtgtacccgggccagacgatcagatctgactcgcacaccgtcaactgctggctgcaggatcaacgagcagagcatgcggtgctgtcaggagatgcgaaggattgaacatgaaaagggggaagaggatgaaacgagtgaaaaagctatggggcatgggtcttgcattaggactttcgtttgcgctgatggggtgcacagcaaatgaacaggccggaaaagaaggcagtcatgacaaggcaaaaaccagcggagaaaaggtgctgtatgtaaataatgaaaatgaaccgacttcattcgatccgccgatcggctttaataatgtgtcatggcagccgttaaataacatcatggaggggctgacgcgtcttggcaaagatcatgagcccgagccggcaatggcggagaaatggtctgtttcgaaagataataaaacttacacatttacgattcgggaaaatgcgaaatggacaaacggagatcctgtaacagccggagacttcgaatacgcgtggaagcggatgcttgatccgaaaaaaggcgcttcatcggcattcctaggttattttattgaaggcggcgaagcatataacagcgggaaagggaaaaaagacgatgtgaaggtgacggcaaaggatgatcgaacccttgaagttacactggaagcaccgcaaaaatattttctgagcgttgtgtccaatcctgcgtattttccggtaaatgaaaaggtcgataaagacaatccgaagtggtttgctgaggcagatacatttgtcggaaacggcccgtttaagctgacggaatggaagcatgatgacagcatcacaatggagaaaagcgacacgtattgggataaagatacagtgaagcttgataaggtgaaatgggcgatggtcagtgacagaaatacagattaccagatgtttcaatcaggggaacttgataccgcttatgtccctgctgagctgagtgatcagctgcttgatcaggataacgtcaatattgttgaccaggcgggtctctatttctatcgatttaatgtcaacatggagccattccaaaatgaaaacatcagaaaagcctttgcgatggctgtggatcaagaggaaattgtaaagtacgtcacgaaaaataatgaaaaaccggcgcgcgcctttgtatcgcctgggtttacgcagcctgacggcaaagatttccgtgaagcaggcggagacttgatcaagcctaacgaaagcaaagcgaagcagctgctagaaaagggcatgaaggaagaaaactataataagcttcctgcgatcacgcttacttacagcacaaagccggagcataaaaaggttgccgaagctattcagcaaaaattgaaaaatagccttggagtcgatgtaaagctggccaatatggaatggaacgtatttttagaggatcaaaaagcgctgaaattccaattctctcaaagctcatttttgcctgattatgcggaccctatcagttttctggaagcctttcaaacgggtaattcgatgaaccgcacaggctgggccaataaagaatacgatcagctgatcaaacaggcgaaaaatgaagccgatgaaaaaacacggttctctcttatgcatcaagctgaagagctgctcatcaatgaagcgccgatcatcccggtttatttttataatcaggttcacctgcaaaatgaacaagtaaagggaattgtccgtcaccctgtcggctatatcgacttaaaatgggcagataaaaactgatggcggtgattgaggaaatactgcttctttatgcgaaggagcggtattttttctctttcttgcacgtatacgtagggtgcagagcaaatgaaaggagtgttttcgttgaattacaagccgaaagcgttgaacaagggtgatacagtcggagtgatcgcgcccgcaagtccgccggatccaaaaaagcttgacaccgcgcttttatttttagaagagctcggtcttcaggtgaagttgggcaaggcgctgaaaaaccagcacggctatttagcgggacaggatgatgagcggctggcggatctccatgagatgttcagagacgatgaggtaaaagcagtgttgtgcgcatgcgggggttttgggacaggacgtatcgccgcgggcattgatttcagcttgatccgcaaacaccctaaaatcttttggggatacagcgatattacgtttttacatactgccattcatcaaaacacaggtcttgtcactttccatggcccgatgctcagcacggatattggccttgacgacgttcacccgctgacaaaagcgtcatataagcagctcttccaggagacggaattcacctatacagaagagctttctccgctgaccgagcttgttcctggaaaagcggaaggcgagcttgtcgggggaaatctgtctttgctgacgtctacactgggcacgccatttgaaattgatacgagaggaaagcttctgtttattgaagatattgacgaggagccttatcaaatcgaccggatgctgaatcagctgaaaatgggggggaagctgacggacgcggcgggaattctagtttgtgattttcacaattgtgtcccggtgaagcgagagaagtctctctcgcttgagcaggtgctggaagactatattatttctgcgggcaggcctgctctgagaggatttaaaatcggccactgctcgccaagtattgccgttccgatcggtgcgaaagctgctatgaatacagcagaaaaaacagccgtaatagaggcgggcgtttcagaaggggcgctgaagacatgaaaatcattcgaatcgaaacaagccgaatcgccgttccgctgacaaagccgtttaaaaccgcacttcgcactgtgtatacggctgaatcagtcatagtaaggattacttatgacagcggtgcagtcggatggggagaagcacccccgacgttagtgattacaggagacagcatggatagcattgaaagtgccatccaccatgtgttgaagccggcattgcttggaaaaagcctggcgggctatgaggccattctgcacgacatccagcatcttcttacaggaaatatgagcgcgaaggctgctgtagaaatggctctatacgacggctgggcgcagatgtgcgggctgccgctttatcaaatgcttggcggatatcgagatacgctggaaacagattatactgtcagtgtcaactcacctgaagagatggcagctgatgccgagaattatctcaaacaaggctttcaaacgctgaaaataaaggtcggaaaagatgatattgcaacagatatcgcccgtatccaggaaatcagaaaacgtgtcggatcagctgtgaaactgcgtttagacgctaatcaggggtggaggccgaaggaagcggtaactgccattcggaaaatggaggatgcgggcctaggcattgagcttgtcgagcagcctgtccataaagatgatctcgctgggcttaaaaaggtgacagatgcaacagatacgccgattatggctgatgaaagtgtttttacaccgcgccaggcgttcgaagttctgcaaacccggagcgcagacttgatcaatattaaattgatgaaagcgggcggcatcagcggagcagagaaaattaatgccatggcggaggcctgcggggtggagtgtatggtcggcagcatgatcgaaacgaagctgggcattacggccgcggcgcattttgcggcaagcaagagaaacatcacacgctttgattttgacgcgccgctgatgctgaaaacagatgtattcaatggcggcataacatatagcggcagcacgatttcgatgcctggcaaaccgggcctcggaatcatcggggctgcgcttttgaaaggggaaaaagagcaatgatgcacactgtcatatcagcagtggccaacatctggacagcgcctgattcacctcgtccgtctgatcaattcatgcttcaaccgactgtaatgatcagagactggctggagcgcatgacgtatgatgaacggcttggattatgtacagacaatgtaatccaaactcaggttctctttggcgaaaaggtacttgtgacggcggaacagggggaatgggtttctgtgatcgtgcctagccagccatcccgaaaggatccgcgcggatacccgggctggatgaaaaagtaccagctggaaaaaacaaagcccatccatacacaacacgatgtgatgatcagcaaacctgctgcctttttgtacagaagcaatggggaaaaggagatcgaattaagctttttgacagttctgccccttattgcaaaagaaaacggatattttaaggtttcgaccgtttttggggaaaggtttgtgaggcaaagtgatgcagtgcctgtcagccaacagaaagggactgctgaagacatcattcaaacgggtgcgttttttcttggccttccctacctgtggggagggatcagcgggtttgggtttgattgctccggatttatgtacagtatatttaaggcgaatggatacagcatcccccgtgatgcgggagatcaggctaaggcagggaagggtgtcccgcttgatgatatgaaagccggtgatctgctgttttttgcttatgaggaaggaaaaggagcgattcatcacgtcggtctgtatgtaggcggcgggaaaatgcttcattctccaaagacagggaagtcaatcgaaatcctcacattaacagagacaatctatgaaaaagaattatgtgcggtgcgccgctgtttttcagaataaggagggagacaaatgacgccactgcctttgttagaggtcagccagctaaaaatgcattttgacgcagggaaaaagcggacagtcaaagccgtcgacggggtcacctttcagattcgtgaaggagaaacgttcgggctagtcggggaatcagggtgcgggaaatcaaccttggggagagtgctgatgcgcctttatcagccgacagaaggaagcgtgacataccgcggcacaaatcttcatgcactgagtgaaaaagagcagtttgccttcaaccgcaaactgcagatgatttttcaggacccttatgcttcacttaacccgcgcatgaccgttcgagaaattattttggagccgatggagattcacaatctctacaatacccataaagcgcggcttctcgtcgtggacgagctgcttgaggcagttgggcttcaccccgattttggcagccgttatccgcatgaattcagcggcgggcaaaggcaaagaatcgggattgcgagagcactgtcgctgaatcctgaatttatcgtggcggacgaaccgatttctgctcttgatgtctctgttcaagcgcaggtggttaacctgctgaagcggcttcaaaaagagaaagggctaacgtttttattcattgcccatgatctttcgatggtgaagcatatcagtgacaggatcggtgttatgtacttaggacacatgatggaaattacagagagcggcaccttgtatcgtgaaccgctccatccctatacaaaggcgcttttgtcctcgattccgattccggatcccgaattggaggacaagcgtgagcgtattctcttgaaaggggagctgccgagcccagtgaatccgccgagcggctgcgtgtttcgtacccgttgtccggaggcgatgcctgaatgtggagaatctcgtccccagcttcaagaaatcgaacccggccgttttgtcgcttgccatctgtatcgaaatgctgaaacgaaggaaaaagtgagataaataaaaagagtggctcctttttactagagccactccatttgtttatacttgatgtaaaaactttacacaaaccgggtaagggacagaaaccgttgatgggaggagtgtcaatcggccggtttctttgtctctttcaaacaagacaaggttgcctgtttcttcatttgaagcaacgaggaacccttccgttgggtcaaatacaaagtcacgaggccagtttccttctgtcgacactctttctacgaaagccagctctcctgaatattgattcacttcaaatacggcgatactgtcatggccgcggtttgcgacataaacaaaacgtccgtcctgcgtgacatgaattgcgcttccctggctgttatctgtaaaatcatcagggatggcagaaacgacttggatttctctaaattcgccggctgtcgggttgtattcaagcgcaatcacttcattgcttaattctgtcatgacataagcgtatttttctttcggatgaaaagcgatatggcgaggtcctgcaccgggagcgaaggaatggcttccggattcagtcaacacaccgtctttaagcttataggtgtagagcttatctatacctaaatcaaccgctaccacataattgtgttcaggtgtgaaccccgcgtagtgtgtatgcggtttttcttgtctttcgtgcggcccttttcctgtgtgagcggcctctgaaacaggtgattgcaagctgccgtcttcctgaaccggaaaaacgtgtaccttcccgctgtgataattggcagtcaggacgaattgattttgatcatcaatgcttacgtggcatggcgaagggccatcaattaactgatgattcagaaatgtcaattcgccgctgtttttatcgatttgataggcagcaactccgccttggccgtctgctttttcgatggaataaaggatggtgttgtttttattcggcgccacatatgtcgggttgcccagcttagcggccagctttggctcgctgagtgcttttttctcagtatcaagctcaaatgaataaattccttcgcttccgccttttgtatatgttcccacatatcctatgtattttgtcatgcgatttcccccttaaaaatgatgtcacctctatattaacgtatcttgataaaataagctgttcaaaacatgaaaaaggggaagattcttcattcgcctcgaatcagcggcattgtgcagcacctgaaggagccgcctgatttaataatttctgacaggtcaatttcgataatgtgatagcctcttttcgatagctgttgattgacatggcggttgccagggagactgatgatcgtttttttttcgattgaaaggacgttggtgccaagcgtaaattgttcgtcctcgggcacctcaataagatcataacgttttgccagcatatcggctgcaactggctcaatggcctgtggataaattaacgcttcgctttcagatataatgttaaatacgcagtccaaatgcaaaaatttttcatgaagcttcactggaacgatcgtatattcaggaagtgcctcttccagctggccgatagctgaaatgtcggtgcgctggctgattccgacatagacaatgtcatcatcgataatgacgtctccgccttcaatactcgtatcaagcatgcgggtgtaagagataccttggctgtgaaaaaaatcttttataacggcttcttctccttggcgaatcggttcagtcatgcttgacagaaaggctttttctccgatgacaaatcctatgtccctagtaaaaacctgctctggtagtccgtcgcgaacgggcaaaaggacgacctcaacgttgtgtgacctaagtgcctccactaagcggctgtgctggtcgttagcggtttttacatgaatattgtcatcttcaaaatgtttttgtgtttcgtttataacatcttttatggtcatgtgctcaggtttgcataagatcactttctgaagtgtgccgtattccgttcggcataccgttttgtgctgagatttcgggatggatacgtccatttgtttttcctcctaaagtgtgaagaatacatttattattccctcatcatgaaaatcattaaaccattttaaattttagacaaatggaagagaatattgtttaataggagaatataagtgcatttagctaaaagatcagacatcaaaggggagaaaggtatggaaacaccggaaacaagattttgtaaagagtcaaaggttgtgaaaaccagcagggtgttcccgcttgacacgaacaaccataatacgctgtttggcggaaaattaatgagctacatagacgacattgcctctatttcagcggcgcgccattgcagacgtgaaacggtaacagcttcaatggattctgtagattttttaaagccgatcgggcaaaaggattctgtctgcctagagtcatatgtgacatgggtcggcacatcttccatggaagtatttgtgaaagttattaaggagcatttgatgactggcgaacgggaactcgctgccacatcctttttgacatttgtcgcattagattcaaatggcaagccggtgcctgtaccgagggttgtaccggaaacagaagaagaaatcatgctgcataatacagctgtacagcgtgctaatgaacgtaagaaccgcaagaaacacagccaggcgcttgcgaatgcgcttggaactgataagccttggtgaacgttaaacccaaaacataagttgttttgggttttttttttgtacttttcaatggtgattattgcaatggttagtccgtttttgctaggggattctataaaaaagcaacaaatgtcatgttaaattgataattttgtgacaactttattaaagattcattttagatatatcttttattcgtaagatcatgtattttaaagatatattatgaatacatcttttcgaaaggattgtttataaaatgttagataacaaaacaatcgaaattattaaaagcactgtacccgtattgcaacagcatggagaaacaatcactggccgtttttacgatcggatgtttcaagaccatccagagcttttgaacatttttaatcaaacaaaccaaaagaaaaaaacacagcgaactgcactggcaaatgccgttattgcagctgcggcaaacattgaccaattaggaaacatcattccggttgtcaaacaaatcggccacaagcaccgcagtatcggaattaagcctgagcactacccaatcgtcggtaaatatttgctgattgcgattaaagatgtattgggagacgctgcaacccctgacattatgcaggcatgggagaaagcgtacggagtcattgctgacgcgttcatcggaattgaaaaagacatgtatgaacaggcggaagagcaagccggcggctggaaagagtataagccattcgttatcgcaaaaaaagagcgggaaagcaaagaaattacatccttctatttgaaaacggaagacggcaagccgttacctgaattccaagcagggcaatatatcagcatcaaagtgcggattcctgattctgaatatacgcatatccgccagtacagcctgtctgatatgccgggaaaagactattatcgaatttccgtgaaaaaggatggtgtcgtgtcttcctacttacacgatgggctgcaggagggagattcaatagagatcagcgcaccggcaggggactttgttttagatcatgcatcacaaaaagatctcgttttgatcagtgccggagttggcattacaccaatgatcagcatgctgaaaacatctgtttccaaacagcctgaacggcaaattctgttcattcatgcggcgaaaaacagtgaatatcatgcattgcgccatgaagtagaagaagcagcaaaacattctgctgttaaaacagcatttgtgtatcgcgagccgacagaggaagaccgtgcaggtgatctgcattttcatgaaggacagattgatcagcaattcctcaaagaactgattgccaacacagatgcggattactatatttgcggttcaccgtcgtttattacggcaatgcataagcttgtatcagagctcggaacagcgccggagtctatccattacgagctattcggcccgcaattaagtttggcgcagtccgtttgaacacatacatgaaactcttctcctttcagagaagagttttttattgagatataagaaggcagacaagcgccggtttctacatccggacaatcacagacccttgccatttgtgcatacacggttttgctgttcttgcattgttttcagcaattcattgtttacctcaatcgctctaattagttgctccatccttagctccaaaccggccagcctgtcgattgtttgctgctggtagctctcgggttggggagccaaaggcagatcaaagggccaaagggtattcgacttctgatttttcatattgcgtattgcgcctccaatcggtgtcactttctattatgttatgttcaggcgatatgcacgttcgcctagacactgatgcatagagggcctgccacggggtacaataggctcaatatgaccagcggatggaggtaaagatcggtgttatggatggtatgggtatttttactgaagccagttatcgtattttcgattgcatatattttgtttcggcttgccggtaaaaaagctgtgtcacaaatgaacaattttgacctgcttttgaccttcgcaatcggaaccattatcagtgagccgatccttacatccaagctgccgatgtcaatttattatgcgggtgcttttttggtgctttatcttatcatgagcaagctctctttatctaataaatggcgatggctcctagtcgtgagcccgactgtcctaatccgaaacggggatattgatgaacgcggccttcgtaaagaaaggctgactgttaatgagctgcttggaaagctgagggaaaagggctatgccgacccggctgacattgatcttgctatcattgaagaaacgggagaagtaagcgtcatcccgaaagaggaagcgagagcggtgcaggtgcgggatttaaatatggaagctgaacggaattttatcccgattccgctcatactggatggcgaaatccttgatcataatttgaaatatctccaaaaaaaccgatcctggctgtttgagaagcttgaggaaaaagggtacagccccaaactgctgtcttcgattacccttggcacgatgaatgcacgcggtgatatatcccttgatttaaataccgctaatgaaccgcagcatgatccttacttatataaaccgggaaataacaattaagatggctctctcttgtaatgagagcttttttcttttttaaagggaatttttgtttggtgtcaaatgtacctagttaggaggggaactgaacatgaaggacttatccataagaaacgacatggcgccaacggtcagtttgctgtattccgcagtggaagaaaacagtctccgtctggcttccatcgtaagccatatgacacacagtgaactttactataaggggcgctgccaaacaaaaaacagcacggctcagcttttgcaccatatcacaaatgttgatatcagatgggtctggcgtatcaaggaaaatcggatcccggaccatattgaacaggcatacggcccgatgacagatgaaagcggacggctgcctgaaccggtgaatcagccaaacttagatgaactcctgaaaagacatcagcatgtagtagagaagctgaaatcggtatgcttcactttaactgaaaatgctttgaaccagccgctttccttcgaaggtgacaccgcgacgatacgatggggaatttggcatatggcagatcataaccgctatcatcaggcacatattgaagctctcaaaaaagaatggaagcaggatgtggcgaagtatgaacgctaaaacgaagcttgtgactgatcgaattcgtttgcgctgtatggaagatcgggatcaagccactttgtttgggctgctttttaatgatcctgacgtcatgacatattattccggtttaaaagataagaggcaaacccgcgagtgggtcaattggaaccaacgaaatgaaaaagggtacggcgttagtctgtggatcgccgaagataagcggacaggggagtttttggggcaatgcggcatcgttccccagcagatcgaaaatcaaaccgtaatggaaattggatatatgtttgcccgccgccactgggggaacggctatgcgcaagaagcagctcgggcctgtctggacatggctttaacgagcggcagttcggcaaaatgacggctttgattgatccgggtaacaaagcgtccatacgggtagcggagaaaatcggcatgcattacagcaaaacgatcagaaaatggaataaaccgatcgaggtatatgaaagaaaatcttacaattgaaagatagagctcagtttagtatcatgatatcatgtaaagttttctagggttccgcatgtcaattgacatggactggtccgagagaaaacacatacgcgtaaatagaagcgcgtatgcacacggagggaaaaaagcccgggagagtcaatctcatgtgagacgactgtccggggtttttttgttttcggagaatcctaatagatagaaaggaatgactcaaaatgaaatggggattggtcgtgcttgccgctgttttcgaggttgtttgggtgataggcttaaagcacgctgactcagccttaacatggagcggcactgccatcggcatcatattcagcttttaccttctaatgaaggcgactcacagtctgcctgttggtaccgtgtatgccgtctttaccgggctcggcacagcgggaacagtacttagtgaaatcgttgtttttcatgaaccggttggatggccgaagctattgttaattggtgtgctcttaatcggtgtaatcgggttgaagcttgtgacacaggatgagacagaggaaaaaggaggcgaggcataatgctgcactggatcagtttattgtgcgcgggctgtttagaaatggccggcgtggcccttatgaatcaatatgcgaaagaaaaaagcgtgaaatgggtgctgttgatcattgttggttttgccgcttcattttccttgctgtcgtacgcaatggaaaccattccgatgggaacggcttacgcggtctggacaggaattggcaccgccggcggggcgcttatcggcatcctcttttacaaggagcagaaagacgccaaacggatcttctttatcgcgttgattttatgctcagcagttggtttaaaaattctgtcataaattgatttttatcaaatcttcagtataatggataaatagtttagacttacaaagataagagggattattcatgaaatcatatatgactcagcggttggacgaataccgtgacggaaatgaggataaagggcggctcttggtcagctgccccgatcagccgggtatcgtctctgcagtttccgcgtttttatttgaacacggtgccaatattatagaatcaaatcaatatacgacagaccctgaaggcggccggttcttcctgagaatcgaattcaactgcgcaggcattcgtgagaaaaaaacatcacttcaggcggcgtttgcctctgtagcggataaattcgacatgacatggagcttaactttggcaagtgaattgaagcgtgtcgccatttttgtttcaaaggagcttcattgcctgcatgagctgatttgggaatggcaaaccggcaacctgatggcggagatcgctgttgtcatcagtaaccatgagggagcgagagagctggttgagcgcctgaacattccattccactatatgaaagcgaacaaagacatcagagcggaagtcgaaaagaagcagcttgaactgctggagcagtacgatgttgatgtcatcgtgctcgcacgctatatgcagattctaactcctgattttgtttcggctcatccgaatcgcatcatcaatatccaccattcattcctgccagcttttatcggtgcgaatccgtacaaacgggcctacgagcgcggcgtgaaactgatcggtgcgacatctcattatgtgacaaacgatcttgatgaagggccgatcattgaacaggatattgagcgtgtggaccaccgcgataatgcggaagcgctgaaaaacatcggaagaacaattgagcgcagcgtgcttgcccgtgctgtgaaatggcatttggaagaccgtgtcatcgttcatgaaaataaaacaatcgtctttaactagactgcaagaggcccgcgcaatgcgggctatttttgatgacaaaaaaccttgacaagtgtcttttttctttgcataatataaaaaaatcattgagcgttgaagaggattagtaagcagacctttctgtgacagagagcaaaatgaatcgctgaaacattttgccgcatgaaacctgccgaacctgccttggagtcctagggggaaaacctaggcgcataacctggcgttacaggagagcggagcgtgcacaagcgcgttcaatcaaggtggtaccacggaaacccatttcgtccttatgaatcaggatgaaatgggtttttttattgtagaagagccgcggaggagaataaatgaaaaaacaaagaatagtagtgaaaataggaagcagttcgctcacgaatagcaaaggaagcattgatgaggcaaaaatcagagagcatgttcaggcgatttccgtgttaaaaaaagcggggcatgaaatgattctgattacctcgggtgccgtagcggcggggttttccagcctcggttatccgtcccgtcccgttaccatcaaaggaaaacaggcggcggccgcggtcggacaaacactgttaatgcagcaatatatgaatcaatttaaacaatactcattaactccgggacaaatccttttaacgagaaatgatttttcgaaaagagaacggtaccgaaacgcgtatgctacgataatggaattattggaacgcggcgtcattccgattatcaacgagaacgattctacatctgttgaagaattgacattcggagataatgatatgctttctgcgttagtcagcggattgattcacgcggaccagctcatgattctcaccgacattaacggactgtatgatgccaatccaaatgaaaatcctgaggcgaaacgatttgattatttgccggagatcacgcctgaattgcttggatatgcaggttcagctggatcaaaggtcggcaccggcggaatgaaatcaaagctgttagccgcacaaaccgcgttgtctctgggagtgaaagtattcattggaactggcagcggagagcaaaaacttgcggacattttggacggcaggggagacggcacttatatcggagacaaagaactatcttcggttaacaacacaaggcagtggattcagttccactcgccgatatcgggagaaattatcattgatgcgggtgccgaggaggcgatgatccataatggaagcagccttttgcccgctggcgttgtgggcgtgaacggaagctttccgaaaggggcggtcgtggaagtcaggggaccgggcggcgtgatcggcaaaggccaaacccattactcctctgaggagattatggaggccaagggcaaacgcagtgacgaacttgattttgagaaaacgtttgaggttattcataggaatgactgggtcaatgtaaaagactaggaggcggaaaaatgagtgaagtttctgtaaaagcgaagctggcgaaagaagcagcagccgaaatgatcatgaaaacaacaaccgagaaggatgaggcgctcagcctcattgcaaacggactccgtaaagaactggattttctcttggcggagaatgcaaaagacattgagaatggaaaagagaatggtttaacaccggacatcattgaccgtctcacattggatgagaaacggatacgcgatatcgcggacgcggtggagctcttaatcgacttagcggacccaatcggcgactctcttgaaacgattgaaaaagaaaacggcctgtttattgaaaaaatccgtgtgccgctcggtgtcgtaggaatgatttatgaggcgaggccaaacgtcacagttgatgcggctaccctttgcctgaagacagggaacgcggttgtgctgcggggaagctcctcagccatccacagcaacaaagcgctcgtcagtgtcattcacagagcacttgagcaatcagcgcttccgattcacgctgtgcagctgattgaggatacgagcagagagacagcaaaagagctctttacgttaaatgatggcttagacgtattgattccgcgcggaggcaagaaactgattgatctcgttgtgagagaatcaacagttcctgtattagaaacgggagcaggaaactgccacatattcattgacgaaacagccaaaccgcaaatggcagaaaaggttgtcgtaaatgccaaaacgcagcggccttccgtatgcaacgcgattgaatcattgctgattcacaaggcatgggcaagacagcacgggaaagaattgctggcccagctggaaaacgcgggagttgaaattcgcggtgatgaacttgtatgtgaacttcacccttcaagtaaacaagcatcaaaagaagattgggaaaccgaatttttagcgcctgtcctcagcgtaaagacggttgaaaacgtccaagaagctgtgaagcatatccaacaatacggcaccaatcattcagaagcgattttaactgaaaatgacaaaaacgcggcatattttcaaacggctgtcgatgctgccgcggtctatcataacgcgtcaacccgctttaccgacggctttgaattcggctacggagccgaaatcggcatcagcacgcaaaagcttcatgcaagaggaccgatggggcttcctgcactgacttctacaaaatacatcattaaaggaactgggcaaatccgtgaatagcggggcaatgttcaatgaaaaagcttatctcattacgagataagcttttttatacgcgaaaaattgacatttcaaatttaattgtgtacaatttaattgtataaaatatatcgggggaatgaaaaatgagtcagccattatttacagcaactgtttcagcggtaggaggaagagaaggaaaggtcatttcatcagaccgcgttcttgagcttgatgtcgcaatgccggggacaccgagagccaagaaattagaaaaagcgacaaatccagagcagctgtttgcagcaggttatgcagcttgctttgacagcgccctgcagcttgtcgcaagaacagaacgggtaaaagtagagacagaggttacagcgaatgtaagtctgttaaaggatgaagcggaccagggctacaagcttggtgtgacgctgcaagtaaaaggagaaggagtcagtgcatcagaattggaggcgcttgtgaaaaaagcgcacggcgtctgcccgtactcaaaagcaacctccggaaatattgatgtgacacttgaagttgctgaataaataaaaagaggatgcctgtacaaggcatcctcaatttttttgatgaagtgtttccagcaatgtatatagagcggattttaactgtttgagatcctccccagactgctttgagagccccagaattgtctctggaatgtcaaccgctttttcttttaataacgctccgtcctctgtcaggctgatcaacacggaccgctcatcctcttcagatctttttctcgtaatcaaaccctgttgttccattcgtttaagcatcggagtgagcgtccctgaatctaaatacagctgttcgcccatttttttgacagtaagcgtttcatgttcccataacaaaagcaaagccaaatattgagggtatgttatattcagcttatcaagcagcggcttgtattgctttgtcatttcccgcgaacttgcatatagcaaaaaacatagctgattctccaatttcatatgatcaaatttattttccattttgttcaccaactcttttttgtcattcgattctattgtatctgaaaaacctcacttttcctattctcggcaaacatagcatgtttaaaaagattagaaagggaaatataacaactagatacaaataaggaggttgggaaatatggcactatttacagcaaaagtaaccgcgcgaggcggacgagcaggacatattacatcagatgacggtgttcttgattttgatattgtcatgccaaatgccaaaaaagaaggacgaaccggcacaaatccggaacagctctttgcggcagggtatgctgcatgcttcggcggcgcgctcgaacacgtagccaaagagcagaatatcgaaattgattcggagattgaagggcaggtcagcctcatgaaggatgagagcgacggcgggtttaaaatcggtgtcacacttgttgtgaacacgaaagatttagatcgggaaaaggcacaagagcttgtcaacgccgctcatgaattctgtccttactcaaaggcaaccagaggaaatgttgatgtaaaactcgaattaaaataatgaccggcatcctgagtgttctcaggatgtttttttggtgtcggagcatgcggggcgggcacagatttatgataaaacttcagagaagcgtttgaagcatgcctttaaaccaaaagttacagatgaagcgggtggctggcacggtgtctgccgtgctgaattgcgcgtatatgctgttttgtatttgcacagggcatagcggctacttggagaaataacaaggaccaggccgcgcatgcctgatccttttaatattctttcttattggcgaagttccgccatgcttgaaacggggataaatgctctgttagtgtcacttgataaaaggggatcgttctttcttcagcaggtttatcaatttctttataaatgaatgaatcatcaaacccggcttcggcagcgtctgtgtgctcagctgcatagaaaacggctttaggccgggcccagtagatggcgcccaagcacattgggcatggttcacagctcgtatacaaaatgcagtcatcaagctggtaggctcctagcaccttacaggctttccgaatagctgtgacttccgcgtgggcagtcggatcattgcttgttgtgacgttgttctgtccttctgcaataatggctccgtctttcacgataacggctccaaaaggcccgccaactcctgcattcaccccatcacgagcaagatcgacagcccgctttaagaactttttatgattcatcccaaaccctcctgtcagttgagtgttataagtatagccgaaaaaggggcaaagaacattctcaaaaaagtgcaaaataaacaaagtatttgggggatttgctaagataagaggagaaaagaggaggggtaatgatgctgcatttatatattgccaggcacggacagacccaatggaacgtggaaaaacggatgcagggctggctggattctgatttaacagaacttggactgtataacgcccgcgctcttggggagcgtctgaaggatattgaattgaatcaggtatacatcagcccgagcaagcggacagaagagacagcaaaaaccgtactgggatcgcggaggctcccgctggttaaagatcatatgttcagagaaatgtcactgggctcatgggaagggaaaaaacaagaagatattgaaagggacgaaccagatctttttcatgcttattttcattatcccgaagcttatcgccagcagggatgtgaaacgttttttgactttgaaaaccgggtaaggctggctctccaaactattttgagccttgtggaatttgatgaaaatggaacagccaaaatattaatagaaggggacgggaagcatcggaaaccgatttccgctttctaatagaaaaaaccatctgccaaagacagatggtttctattttatacaagctgtgtctgctgtgctctcgcctgttttgcggcttcaaccatgtttttcaatgcggcaaccgtttcttcctgctgtcttgttttcaatccgcagtccggatttacccagaagcggtcagtcggacagacggcaagcgcctcaacaataatgttgtacatttcttcagttgacggcacacgagggctgtgaatgtcatatacaccaaggccaagccctttcaaatacgggtggtcttttaagtaatctaaaaatcctccgtggcttctgctatgttcgattgtaatcacatcggcatcaagatcattgattgtatcaacgatatcttcgaagttgctgtagcacatatgtgtatgaatttgtgtctcgtttttcacggaagaagtggttaatctgaaagcttctgccgcccaagtcaaatactcatcccaatcgcgggttttcaatggaaggccttcacgcagcgctggttcatcgacttgaatgatttgaatgcctgcgtcttcaagcgctttaacttctttgcgaagggcaagcccgatttggaaggcgatttctttcctcgagatgtcgtttcgagggaaagaccagtttaagattgtaaccgggcccgtcagcattccttttacatgcttggaagtcaatgactgtgcgtagactgtgtctttcactgtcatcggttcaataaattcaacatctccgtaaatgactggcgggcggacacagcgtgagccgtatgattgaacccaggcatatttagtgaaggcgaaaccggccagcttttcaccgaagtattcgaccatgtctgtccgttcaaattcgccgtgaacaaggacatcaagctccaattcttcctgaatatcaatccatctttttgtttccgcattgataaagttttgatactgttcatcggaccactcagctttccgccatttttggcgtgcgctccgcacttcagcagactgcgggaagctgccgatcgttgtcgtcggcaaaagcggaaggccgagagattcattttgcagggctaaacgttcttcaaacggaatcggacgcttgaagtctttatcagttaattgctcaagctctttcttttgttcagaattggcgcctgttgcaaactgtttaagcgcctggatatcagccttagcctgctgaatctcttcgctgatcgccgcttttcctgatactaagccttctttcaaagctgttagctcggccagcttttcttttgcgtaggataatccgttcaataggtctttttccaaatgctcatcagggtgtttcgctactggaacatgcagcaggctgctggaaggctgaatccacagttcatcaacttttgcaatgctgagaatatcaagaacagcatcgagacgctcttcaaggtccgctttccaaatgttgcgtccgtcgataacgccggctgccagcactttgtctgtcgggaagccatgtgttttaagctgttccaggtttctgcctttgtcgtgaacgaaatcaaggccaattccctgaaccgggtaagagatcagctcttcataagcatcaacagaatcaaaatacgtctgcaaaagcacattcaaggatgaaagctcacttgtaatgctttcaaataattcttttgcaccgcggacatcttcactagaggcggtaacgagcgccggctcatcgatttgaacccattttacgccttcttcttcaagctctttcaaaagctgtacatataatggcacaaggcgtttttggatcgcttttgcttcagacggttcatagcctttagcaagcgtaacgaacgtataagggccgacaatcacaggctttgtttccacaccgtattcctgtttgatccggcgataatcttcgagttgtttgtttcttgtcagacggaactcaatgctctcgtcatattccggaacgatgtaatggtaatttgtattaaaccattttgtcatttcactagatacggcgtctttgattccgcgggcgatagcgaagtatgtatcggtagcgtcagtcaaatgtctgaaacgtttcgggatccagttgaagctgactgctgtgtcgagtacatggtcatactgtgtgaaatcagaaacaggcacaacatcaatctgctggtcaatttgtgtttttactgcggataaaaatagttcgtcgctttgcttcaaaaacgtatctttatcagtactgcctttccaatacgcttcaagtgcttttttccattcccggttcagtccgattctcggaaatcctaaattcgatgttttgatggttgtcattgtttctcctcctttatatgtaaaacactctctttcacccgcggatacaggctgctaagaggttttctcacaacaaaaagcctctttcccatgagagaaagaggcttttctacgtaaaacactgcctctctcatctctcagacacaatctgatggaattagcaccgtgccttatgagacatcagtctcggcgcgaaaagcagtgcgccccatttcacaatggtattacggtcggttgctgttggggtcaaaaggccaatccctcgcccaactctcgataagagaaaatgttattaattttttgaaaagttgaatcatttgttggtaatcttaacagtaattcaaattcattgtcaacatagaatttgaaatttttatttatatgatgtggtgtatattatataagaaaaataatcttatagggttaacaaatgtgattgctctgctttttctgcgagttcatcaggagctgttaaatacaggaatccattgcctgccagcgtttttgcaatatcaagaggaagtgtcctgcggattagctgtgcgaaaacctcagattcagaaagctttctttgaaatgattcttcttcatagcttttgattaaagcaagcgcaccgctgacatgaggggcagccattgaagtgccggtcagcttaccgtacttcttgttgggaagggtggataagatattttctcctggtgccacaaggtcaatctctttatttgcgttagaaaattctgataattctcgtgctactgaaacagatccaactgcaatgacttcgttataagctgcggggtaggaaagctcttctgtgcgttcgtcgccgtcaccctcatttcccgctgcacaaacgacaagcactccgtttttgactgcgtttttcactgcttcttccagctctggcacatcgcttggccctccaagggacattgagatgatgtcgactttctgttccaccgcgtagttgatgccgttaattatccattcgtattgtccgctgccgttctcgccgccaagaaccttcacaatcaataggcttgcctcaggcgcgactccggcaatgcctccgtttgaatcattagctgcaattgttccggcgacgtgtgtgccgtgtccgttgtagtcggaaattgcatcttccttgccgccgtcgtcatccgtgaagttctttccgccgatgatttgattttttaaatcagggtggcttgtgtcgcagcccgtgtctaatacagcaactttaatatttttgccttttaccccttttgcccacatttctggcgccttaatcactttaatgccctcaggaagctcgtttacatccatgatctgctcattcgtcacatacgggatcaagcggatttcaccattcataaaaaagccctccttttttatgctttcaagtggattcaagggtgttgcctcatattatatgaaaaaaacaagcgctcggacagagccatttgaagcattttgaaaaaataggatacacaccaaagaattagtaattttcaaaatattggatggcttcggcgtgtatgactgggattcaactgtaagtcaagttataatagtgttggggaaaggagcagtgtcatgaaactgaatgaaaaattatatgcatttttttcagagcatgtggaacaaatggccgaggaatggattgaaacgatggaggaaagtgatccgaattcgctttacgccctacataatgcaacagtaacggaagaattgaaagagcaggacagagaattttaccggcatctgaattacatgtatgttttaccggaaaaacaatttctcgaagagtttcaagagtgggtcattgagctgaccaacgatcaaaaacatctcgacacaccggttcagtatgtcattcgggagtttatgagaaacaggagattatatacgaagtattttgagaagttcgcagaagaaaatgagtcagcgtttgaaccgggagagaagcaaaaatgggcagatttgattgtaaaagtatttgatttcaccatttatacattcgttgatcacgctgaaatgaatgccaagcagcaattaaacgcccaaagagaaatgatattggaactaagctcacctgtcattaccctgagcaaatcaacagctctgctgccgcttgtcggtgacattgataccgaacgggcgaagtttattctggaaaacacgcttcaagcttgtgcgaaaagacgtgtggagcatctgttaatcgatctgtcaggtgttgttgtggtggatacgatggtggcgcaccagatctttaaattgattgaggcgcttaatctgatcggtgtccggtcaaccctgtcaggaatcaggcctgaaattgcgcaaactgctgtacagctggggattgacttttcgaatattaccattaaaaccaaccttgcccaagcattaaactatcatcaataaaaaaatccgctatctgtgatagcggattttttatgatgcgaaacataaagatacgagaaaggatcccgcgaataataagaggacgaggcaaaagaacacccagtcgcgccggttcacgctcaatttcctataatatgtccggtttctgcttcctgtaaaacctttcgattccatcgcaagcgctgtccgttccgcttttctgatggcgcttgccaatagcggtatggtatatcgttttaacgcactgattttcttaatgatgccgctctccgccgctcctcctctgattttatgagcctgctgaatcagctggatctcatcctttaacagcggaagaaagcgaaagcctgcaatgacaccgtacgcgagctttggtgagagcctgcactgctggacaaggctcagcataaataaaatcggatcggttgtaaaaacaaacatcatcgataaggcggaaaagcataaaatacgaaacccaagggagatgccgacagacacattatcgctgttaattgagatagggcctgcttgaaacaaaaaattattcggtgttgtcggcacctttccaaaaactgcggctgtccacacgcacccgaatgctaaaatcaaaaacggaatcgtaaacaacaaccattttttcaatgggattccggccgccagtagaacgcccgcaacgatgatgatataaaaacatgccggagtgtaagggttgtaaataaacgacagcatgacgacacaacaaaaaaccgccgccgctttcacagtcggattaatgagatgtaacggctgcttcatcacgcacctcctcttgatatgccatccattcatatagaaggggaagggtgagctttgctttttggacaagccctgtttcttgagaaaacaactgcgctggagatccgtcaaaggccaggcctgtatcgtgaagcacaagcacgctgtcagcatacgaagagactagctccatatcgtgtgtaatcataaggacagcggttccctctgtcttgatacgctgaatcatttccatgcattcagtcaccgtgcgggcatcctggccaaaggttggttcgtctaataataaaacctttacgttatgcatgagcatagtagcaacgctcagtcgccgtttttgcccttggctgatcgcaaacggatgatgatcagccaaatgcgcaagaccaaaacgctgcagcaggtgttgcgcttttttctcagtttcagcatttgctttctggccgaacagaagctcgtcatataccgtatcggtgacgaattgatgctcagggttttgaaaaacaaatcccatccgtttacgcaattctttttctttatatttctgcagcggctgatcatagagaaggattttgccgctttgcggtttcatgagacgggccagaactgataggagcgtcgattttccagttccgttcggaccgacaagcgccgttaaagagccttcgcgcaacgaaaagctgatgtctttgaaaatcgcctgctgtcctctcgcgaacgaaaggctgctgacttcaagcacactctccccaggaggggctttcttctttttggcatgcccggcaggaataggctctttgaacagcatctcttttgataaagtaaacggcatactcagcttttcctgcagatgacagacctttggaatggcgatgcccaatttctttagtgtttctgcttcatgctgaaatagatttttcgtcaggccatccagcgcttttttgcccgatttgtcgagcacgatcgttctctcaatccaaggcgcccattcatcaagctggtgctcaatgacgaggaggctgaaacctttttcccgctgaagatccttcatcagatgaacgaactcccgcgctgagaaagggtctaaaagagaggtcggctcatctaaaataataagctcaggctccatcgccaaaatacaggcgagagccactttctgcttttgtcctcctgaaagggttgagatcattttttcttttaaatgggtaatgcgtaatttttctaatacggcgttgattttctctgtcatttcttcttttggaatttgcagattttccagcccgaacgctatttcgtcctccaccgtcagcatgcagaactgctgatcaggatcctgaaaaacgaccccggcatgctgagcaatcgtttcggaggtttcagcatctgtgaccggctgttgaaatagaaagacatgtccggactgaatgccgtcgcaagcctccggatatagaccgtttaaacaaagggcgagcgagcttttaccgcatccgctcggtcctaataataatacacattctcctttttgaagctcaaacgaaatgtcttgaaaaaccggtttctcgtcttcttcataagagaagctgagctgctcaaccgtcagaagctcatcaaaggcttgcatgttctgacgcccgcttccgtttctttttcagttcctttccgagtgccattccgtttaacacacctgtataagcgagagagtcgctgacagcttttccgagaagccccgccaaaagcgcgccggaaatgaggcggatcacaagcataatgagcagataacctggtgaataggctgcatagccagaaacaaagagatcatagataaagctggctactgaagaccccataccggccagcataaggacagggagagagtatgctttccagcgtgttgcaagaaatacagcctcagccccgagcccttgaacaatgccaatgacgatgaccatcgggccagacggatttcccagcaggcactcaacgagagcggcaatgatttcagaaacgagcgcagcacccggttttcgaatcatgtacgcggcgatcacagaaacgataaaccaaatgccgtaaatcggttcataggcgattggcccaaacatacctgcaagtacgtttccgaaatgtgtaaataataaataaacaacggcaaatacgatactgataacggacatgatgacaatttcttttactttccagcttttcatgttatccctgctttctgttttttcttgatggactgttagccgaaagattcacagtcatggtgatgtggtttgtttgctgctcagccatgcggaaaacggcttccaatgtgctgaatacgtcatgcgcatccccgtcaagctcgctcgcgtaatggacaccctgtacgaaagtgccttgggcttttgcaatgtcgacagccttcataatcaatcccatataatccggctcgttcattggataaagggcaaattggcacggcgcttccgccttcaagcctcggacagcatcttcattgacacgcttatcacctttggaaagatatgtatccccctgtgtgtcacccgggcatccaatggaaaacgtgccgttcatgacgatgtgtttttcgctgtttgctgcatgaaggtaaatggcttttgcagcatcgaatacatgatcaatcgatccgcgtaacaccgtgctgatatggtcggttttcgtccataccttggatgtatctgtttttttcaacgcagacttgatcacactgataaaatcatccgtcatcggatataaagagaagcgaaaaccggcgattctgcttgtaccgcaaatatgctccattttctccgacctcctgtttttttggtaaaataaaaaactgcatatcctaagggaatatgcagtcatagatcgattaagcgcacaaaaaaatacaccattcggtcaacctgcacttccccacgctggtattatccagatcgggtcataagggatcaaagcgcgtttcttccgcgctttatctcagccaaaacagcacccctagtgctttccgtatacaattttttattttgacatcataatagatgataagaatcattttgtaaacaacgaaatcatttttttcatatagggacgggagaggatgatcaaatttggaaaaaggacacatattaattgtggaagatgaagaaaaaatcgccagggttcttcagcttgaattggaatatgaaggatacagtgtcaccatcaaacacaatggcacagaaggtctggatgcggcagcgaaaggcgggcattccttggtacttcttgatgtcatgctgccggggcttagcggactggaagtgctgcgccgcttgagaaaaacggattcgcagacaccggtcatattattaacggcgcgagacagtattcctgataaggtaacaggtctggacatcggtgcaaatgactatgtcaccaagccgtttgaaatcgaggaattgcttgcgagaatcagggcggcgctgcgactaaatggaacaaaaacggaagatatcggcacctttcttacatatgacgatttacgggtgaacgaaaaaacccgtgaagtgagacgcggagacaaagaggtggaattaacgccgcgggaatttgatttactcgtctatatgctaaagcatccgcagcaagtgctaacacgggagcaaattctaagctcggtatggggatttgattatatcggtgatacaaatgtcgtggacgtctacataagatacatcagaaaaaaactggactatccttacgaaaaacagctgatccatacgattcgcggggtcggctatgccattaaggggtaaacgatgaagctgaagacaaagattcatctatacacatcaatatcactgttgattttattaattttggttcataccgcagtctatctcattttttcgtccgcgctgacatcaaaggatgcggcccggcttgctgatgagacggataacatggccgaagcgctgcgtgcggctgaaacagaaggagtggctttgcaggatatgctgcaggcctatcttccggcaaatggcatggtgcgtgtagtgaatggtgatcaaaaagccgttatgacgatcacaaaagaaaaagcctataaagattttcctctctcttttcatagcggagaaaaggcagatgtgaggaaacatgacggcaagctgtttgccgaggctgctgttccggtgatttggaccgatggacaagtggtgtctcttcagctggttgaaaggcttgagaacacagaagagagtctgtttctgttgaaaatcatcttaatcgctgcaagtgctgctgtctgcattgcttctttttttgcaggcagcttgctactagcccgccgaatcatcaatccgatcagacgattaatgatcacaatgaaagacatacagcgagacaaagaatttaaaacgatttctttagaaggacagtccaacgatgaattgtatcaaatggggctgacatttaatgaaatggcaatgatgctgaaggagcactatgataaacagcagcaatttgttcaagatgcttcacacgaattgaaaacgccgctcaccattatagaaagctacagcagcctgatgaagcggtggggggcaaaaaagccggaggtgcttgaggagtcgatagaagccattcactcagaagcggtgcatatgaaaaaactgaccaatcagcttttggcgttggccaaaagccatcaaggactcgaggttgatctgaaaacaatcgatctgattaaagcggcgcgcgcggttatgcaaacgctccagtccgtttatcagcgtgacatattgcttgaaacagataaagagagcctgcttgtaaaggctgatgaagaacgcatcaagcagctgttgaccattttgcttgataatgcaataaagtatagtgaaaagcctattgagatgtcagctggaacgaggaatggacggccatttttatcagtgagggatgaaggcatcggaatacctgaggagcatatcccgcatttgttcgaacggttctaccgggcagatgaagcacgaaacagaaaaacaggcggaacgggtttaggcctttccattgccaagcaaatcgccgatgagcatggcattgagctgtctgtcaaaagcaagccgggacaaggaacagctgtcaccatgcaattcagcgaacagaatgggggaggccgatgactaaaacaataaaaacagtatcttttgccgcagcagccattttagttgtcatcatctgtacgtttctcatcattcggcaaacccatgagaacgtattgtcaaaggagactgtcgtaaaaaaaatcgaatcctcttatgaaggcaaggtcacgaaagcaacacaatcaaaggataaaaaaacatatgatataacgcttgaaaatcaaaagggaacttactttgtaaaagcagacgcaatatcggctgacattctttcaatgaatagagtaaaagcagtgaatccatctgccatgacagaaaaagaagccgagcatctcgcgcttgagcgggtgccgggaacggtcaaaaaacaaacacgacaaagtcgagttgccacttataccatacaaaaagaagatgggaaaacatacgaagtgaaggtagacatgcaggcaaaaacagtcttgtctgccgatcaaatcagcagcaaagatcaacaaaaaacgccgattacgaaaaaagaagccaaaacaattgctgagcgagaaacgggaggaacagcggatgacgcagatctcgaagaaagtgagggcactctcatctttgaagtggacgttgatcttcctgataataaggaagcgacagtgaaaatcaatgcctacacaggaaaggtagctaacattgtgtatgaagactgacggtttctcatcaaattctcatcttgctctcgttttcctttcatgttgagtgtgtaaactgtactcatacaaaacaaaggaggactcacaaatgctcaagaaaaaatggatggtcggtcttttagcagggtgcctagcggccggaggattcagctacaacgcgtttgccaaagaaaacaatgaaaacagacaggcttcttctaagacggatgcactcactgaacaagaagcagaagcaattgctaaaacagttgttgacggcacagtagaagacattgacagagacctttacaacggcaaagaagtctatgaagtggagattgaaaaagaaggtgaagactacgacgtttatgtagatattcgtacaaaacaagcgcttaatgacccgctaaaggagaaagcagaacaagtcgccataaccaaagaagaagctgaagaaattgctttaaagcaaacaagcggaaccgtaacagaaagtaagcttgacgaagatgacggtgcttacatctatgaaatggaaatccaaacgaagcaaggaactgagacagaatttgaaatttccgcaaaagatggacgcattatcaaacaggagatagatgactaatcaaaacccccgctgcagcgggggtttttcatgataagaaaccttcttttggacaatctaagtagaaaaggaggcgaaacgcatggaaaagaaagaggagcaatacatcaatcaggctgaatatgtccctcatccgacgaaggaaggagagtacgccttatttcttcatgaaacgtatcatttgctttctgaagatgacgagacacaaacaacagaataagggcttaggcccttgttttgttccgtaattgtgatgtaagcgcatttattacttttttgagttgacacagcttgtttttttctgtaatctcagtgtgtcaattcaattaggaacttcgttaggtgaggctcctgtatggagatacgctgctgcccaaaaatgtccaaagacgccaatgggtcaacagaaatcatcgacataaggtgatttttaatgcagctggatgcttgtcctatgccatacagtgctaaagctctacgattgaaggcgcccgcacgctttttttgccgtgcttctttcaccttcaatcccgaaggctttttttatgcctttaaaacgaaaccaatcaaaggaggtgcggagtatggattctccccattcgagtcaatctgaagaagtacccatatactatgacagcaagacaattgattacacgatgaggagacgaactgccgcaccttctggcgaggccggcacgtctccgtagaggaggtacgagtcccgatggttcaaaacatgacctatgacgaactcattttacgcatcattattttactgcgagacgggaaaatcagggatttcagaagtgttattgatgagcttcagccctatgacatggcatttatttttaaagaaatgccggaaaaacaccgcgcccgctatttatcttatttaactgtagacgatatcactgatatgatcggggagctggaacgcgaatttcagcttgtcgtcttaaataaagtcggaaaaacaaaagcaacactggcgatgaacaaaatggacaacgatgacctcgctcaattgcttgaagaaatggacgaagaactgaaggaacagcttttatccagcatggaagcgtcagagtcaaaagctgtacagctcttaatgaattacccggctgattcagcgggacgcatgatgacaaaccggtatgtgtggattcctcagcattacacggtaaaagacgcggtcgtcaaactgaaaagcttcgctgaaatagctgaatcgatcaactacttatatgttattaatgaaagcaaacagctggttggggttctttcctaccgcgatttgattctgggtgaacctgaagaaaaggtgcaggatttaatgtttacccgcgtcatatcagcagatgctcttcaggaccaggaagaagttgcccgcctgatagaacgttacgattttttggcaataccggttgtagaagaaaacaacgtgcttgtcggcattgtgacggtcgatgatattatcgacgttgttattcgggaagctgatgaggattacgaaaaatttgccgcttccggtaaagacatcacctttgacacaaaagcttacgtggcggcataccggcgcctgccatggctgattttactcttgtttatcggactgatttcaggaagcattatcagctattttgaagacgcgctgaagcaggttgtcgcgcttgcgtttttcatgccgatggtgtcagggatgacaggaaatacgggaacacaatctctcgcggttgttatcagaggtttgtctaaagaagaaatgaacaaaaaaacgattgtgcgcctgatcttccgggagttcagaacaagtatttttatcggagcggtttgttctgtgctgattgcgattgtctccatcatatggcaggggaatgcgcttttgggatttgttgtcgcctcttcactgttcttaaccttaatcatcggcacgatgtcaggaacgattatccctattattttgcacaaactgaaagtagacccggcgattgcttctggaccgctgattacaacgttaaacgatattttatctttattaatctactttggcattgccactgcattcattcactcattataaacgtaaaaagtccgtctcaactgagagccggacttttattatttaacggtttttgtaccgaaagtgagcattaagctgcccctccagcatttttttccgcacttgcggatcgttttttaacatctgttcttttttgcgcatatcctttaaaatctctgccgtctgtacgccgtcttcacgtttattggcgatatccatcagccgctctacatcagcaaaggagtattttcttgtcccccttgaagaacgctgcgggtaaatgagctttcgttcctcataatacctgatctgtcttacggacaatcctgtcaattcactcacaattccgattgaaatcacttttttgtctttataagaatgatcttctgtggtcatttttccacccctggatgtcttttgataatagtatataaaaaacaaagagaaaaaacctaacgcttgtcatattttctaacatcaaatagaagatttttgaaaaaatacggaagaaaaattaacaagaataatgcgtaacacccaagcacgttttatcctttatgtaacgaatcaaacaaggaggaaggataatcatggaggaagaaaaagcggtctcactggcaaaagaaattatagagttggatatcaagcgtgatgaaatgctggagacgtttatgcagcttgccggagaacaggcttttcaattattaagatcggttcaaaacggacaataccgaaaatcttcgtaaacataaattctttacattagattcataccacgttcatttaaaaagagtatcttttgtataggatacctcaaaatgaaggaggacgctatgagtaatttattgaaatccgctttagaaaaagaacgacgccattattctgaaaaactctatcagattggggtttataataaagaggtcatgaacaaaatgacgatttctgagcttcggaaagaatacgcttatttctttcgaagcattacaaatcataaaaattatccttatacaagataatgtataaggatttttttgcttttagaaggaatttctcgaattatagcgaatacgtatagtaagggactgaactcttattatatgtaagggttttcattatttttttataaaaatcctatatacgaggtagatatgatgagattatcgtttaacgaagaagaagttgagcgtgcgatgaatttgtacagagtttttgcaagggctttcaaaagtgtgtccgaacatagtatccgtgatagcaaagagcacggttttaatcccactgaatttgctgtactggaactcctgtacacaagaggcccgcaaaaattacagcaaattgggtcgagacttctgcttgtaagcggaaacgtcacatatgttattgacaaactagaaagaaacgggtttttagtaagggagcaggacccgaaagataaacgctctgtttacgcacatttaactgacaagggaaatgagtatttggataaaatttatccgattcatgcactgcgtattgcgagagcgttttcaggcctttcgcctgatgaacaggaccagctgatcgtcctgctcaagaaagcaggcatacacagccagcatttgctgtttcgttaactattctacactctctgtttcaggagagtgtttttttgtttcataagattctttttaaaacatcttcaatcttcctatcagacatttcgccaaggtatccattgacgtgttttttatactccttcatctgttcgttcgattgaaaaaatgccgcgatatactcttctgctttcttcatgtcccagtttctcatatctgtgacgagtttcctttcatgtagaaggtttaaattcatttcctcctgtcccggcagtgcatgataaataaataccggaagccgtttctgtaagcattcactgatggtcacgcctccgggtttagtcatgatgcctgtcgcctgttcgtacaaacggttcatctctgctttgctgtgaaggtaagaaatcgcctcgatcaaggggtggtgtaaacttttgacataggagtagagcttttcgtttctgccgcataatattttgtataagatctttccgcctggcgacagttcctgcacccattttaaaatcccaccgacccccatactgccccctgtgatgatgatggtatatggcgggtggtgctgcaaggtatctgctgattccattgcaaaatttcggtgaactggaatgccggtcaagtatatgttgttctgatcgatcccctctgatattagctgcttctttacttccgtgctcggaacaaaatggtaatcaatgttcttccgtccccataattgatttacgaaaaaatcagtgtatacattcacaaccgtcagattcggatattcaggctttaatcggttcagcagataagaaggcagcgcatgtgtgcagaaggcgatatcaggctgtttttcttggaggatgtgcctcatttgctgtgtgaacagccattcgtacatgaaatagcgtttgtcatgctggaattctccgcaggcgaggagcctgtaaatgccgctgtacgttttcgggaaatattgaatccattttaaataagccacggaggacaatttttctaaccggctatacgcatgtgaaaagatatcaatcttttcagctgccagcccttgagactctaattcagcctgcaatgcatcagccacatgatgatggccggtggaaatgcttaaaaaaggaaaaatgagaatgtttttcatgacagtcctcctaaaaaaatatggcaactatattttgaggagaacgttcacaaaatataagggtgtttttgatcataaggaaggtgaaaagatgaaaacttgtttcctttccatatggagagtggttgacccgatttatttctttttttcaaggctaagcttgattgacaacgatcaaaaaagcgtttttcgagtcaggctgacgaagtataaaggacatcatgtcgtgcttagcgatggaacgcatattagaaaaaatgatgtgctcgttaaaattcatctgcataacataaagctgatcagggagcttcaaagcattgagagcgcagtcagaaagggaatcattatttatcagaaagtatatcaatcgatgccgcttcttcttgactatatcaacaatcataaaaaaagcgagaaaatcaaaggaatcattgggattacaatgcttgacaaaggtgtggaaaggctcggctttgatgtgatcaccccggtgaatcctttttacagatgctttaaaaaagtgtcccatgtgccgattttatatttgacttcaaagcctgtgagcttgcggcatttaccgaattcatcctatttgtttatctcaaaagaaaagctgcagaaaacctatcaaaaaaaagactgatgcctcggtcagcacagtcttttttgattaaatctgatgaaatgtcacttcagggcggcttccaacacggatatttacgccggtttgtcccaagccctcgctgatataaaatggtttatcgtgatgataatgaaggcctttaatcatgttcattcgcacgagcttgcccattttcaccaaatgatacggttttggccagtgaatttgcccgccgtgaaaatgccctgacagcaggtaatcataatgaacatctttcatatccagaataatatttgggtcatgtgttaagacaagatgatagccattttccagactttgataagagccggtgatattactccgattcgtactgtaatcatcaatgccgataatattgactggccctgcagccgtctcgattcgaacatgttcattttgcagcgtgatacagccgttttcctctaaaactcgcttcaatctctgaaagtcctcttcttttaatacataatcgtggttaccgaacaccgcgtacattccatatgcaggcttcagcttttgcaaggcgttcaagtaacctgccagcttcggaatattacgtttccgatcaagaaaatccccggtaagagcaatgatgtccacaggctgatcttttgttaaatgatacagctcctcaggtgagacagaaatgttttccaagtgaagatctgataaatgaaggatatttaatttttttctggctggaaggccgtctttttggtcgattgaaatggtgttgactttcacatcttttgtattgcggttcgctttatatagaaatggcacaaatacgagtatggccaatgaaagtaagattgtaaacaaaatatatcccctcccttctatcagtatagtaagtgatcaagccctatggatagcgggaattaatgggtagagacaggttgaaaaacggattgtcatatgatgaatgatttggaagggaaaagggataataaattttgacacatgaggcagaacatgccgacggagtcagaataacaaatggatgtgtaagcaatgttacgattgatgagacaacaaaaaaaagaaacatattatctctggatcgcattatttcttcttttattgtatgtatccccgctttttattttaaaggaagatgcccatatccgggtccacgataatttagattccaacatcgcttggtacaaggttctggccgatagcggagaaatcgtcggcaaggttgacgctgccattccgcaaatcattaacgggctgccccgggatgcctttggcaccgagtggagcggaattgtttggctccatgctttcttttcttccatgaccgcctatgcaataagccagacggttacaagagttgtcgctttttttggaatgtatgtgctgctgaagaaacatataatcccggaaccaaaagcggctttcatccgaattggcgtatcgcttgcatttgccttaacaccgttctggccttcgggaatgctgagtacgcttgggtaccctttggcactgtgggcttttttaaatatccgaaaaggggatatctcatggagagagtggctgacgctgggcttgctccctctatactcaagctttgttctaggtttcttctttttcctggcagggatggcgtgtttttggctgtatgatgccattacaaaaagaagatggaatttgatgttcttaggcagtattgcatttatgacgagtatctatcttttcgttgaatatcggcttgtctattcgatgctgtttgagcacgcaccgatgcatcgtatcgaatttatctcatccaggcatgacgtttggcattctcttcggctatccgtaaaaaactttgtctatggccataatcatgtgatgaccgttcataccgttgtcatccttccgatcctgctggtcgtatttgctgctctgctgttcaaacgaaatcggacaaagccagaaaatgtgtatctgtttttatgtgtgcttaattacggattgtcattatggtatgcgttttggttcaacaaaatttgggctgttccaaagcagaaatttgcctttttagcagaatttaattttgcccgttttcattttcttcggccgcttgttatatacgtgagctttgcgcttgctttatatctcatttggcggatggggaaaggatggaaatggcttgtgtacgccgcagtcgctgcacagctgatggtgttggcgccttttaatgaagaatatacgtatggcgttcattacaacgcgccgacattcaaggagttttatgcatcggagcaattcaaagagattaaggaatatatcggacgtccgcaggattcgtacagggtggcgagcatcggactgcatccgtctattgcccaatataacgggttttatacgttagatacgtataacaatctgtatccgctttcatataaatatgaatttaggaaaatcatcgaaaaagagctggaaaaaaattctcggctgaaacaatactttgatgaatggggcagccgctgctacctttttgtcgatgaactcggtaaacgatatgatttcaaaaagaactcgaagaaaacgatcaacaaccttcaattaaatacagatgtatttaaaaaaatgggcggacggtacattttttcttctgttccgatcatgaatgctgaacaaaaccatctcgcgctcgtaaagacgtttgaccataaagattccgcctggcgcatttatttatatgaaacaagataaggaggatatcgattgaaacagtcacagccagtattaaccatcgtcgtcccgtgtttcaatgaagaggaagtgtttcaagaaacaagccgtcagctgacagaggttgtagatgatttaattgaagaaaaattaattgctgaagacagtaaaattctgtttgtcgatgatggcagcaaagaccgcacttgggctttgattgctatggagagcataagaaacaagaaggttaccggcttaaaattagcctgcaatgtcggccaccaaaaagcgcttttagccggactgcataaagcgaagaataggtcagactgcgtcatttcaatcgatgctgatcttcaggacgacatctctgtgatccgggattttatgctgaaatatcatgagggctgcgagatcgtttacggtgtacgccggagcagaaaaaccgatacctttttcaagcgcacgaccgcgttagggttttatcgtctcatgaataagcttgggattaaattaatttataatcatgctgattttcgtttaatgaataaaaggtccctcgaagagcttgagcgttatccggaagcgaatctgtttttaagaggtattgtccccatgatcggctttaaatcggccgaagttttgtatgaccgcaaggaacgctttgccggcaaaacgaaatatccgctgaaaaagatgctatccttcgcttttaacgggattacttcattcagtgtcgcaccaattcgattctttacgcttttagggtttgttttgtttttcctcagcgctgtggcagggattggcgcgtttattcaaaagctgctcggccatacgaatgcaggctgggcgtctcttatcatatccatttggtttttgggcgggctgcaattgatgggaattggaatcatcggagagtatattggaacaattttttctgaagtgaaaagacggccgaaatacgcgatcgatattgatttgtataatgaacagctgagcccgcttcagcgccaggaaaaagagcggttagaaaaaaagtacagttaaacacggaaagagctgacttcattagtcagctctttttcttcaactgatgcaatatagcgctaagcggttcgtcttgcgggttgcggtaaaaatcaaaaaatgggcagccctgcttcttaattcgatcgatgaccgtatcaattgtaaaaagagcgggtgttaaagatgattgcacctcatgccagtagagcggggctgcaacagtcccaagctcatttcctctcgtcgaatagggacagataatcgtttttccttctgcatgctgcaaataatcaagatacaatttgccgtgtctgtttttaatcaagcgttcagtggtaaagagctcgggaaatgcattggtgcagtactctgcgatcagctgcgtaaattggcgtgtttcttcatacgtaaatgcctcgggagacaagggaatataaagctggattcctttgttgccggacagcttcgggtacgatgtgatgccaaaggaatccaacagccgcttcagttcatttgcggcctgcacggccataagaaagtcatctcgcgaaggcgggtctaaatcaatgacaatctcagccggacgcctgcttttaatggtttgaaaaggaacgtgaaactccaaagcaagctggttgcaaagccatagcaatgtagacatatcctcacagacaatatgttcatggcttccatcatagaaggactgaacaaaatccggcgcatagtccggcttgtttttttggaaaaatgattcgctcctagatccatgcggatagcggatgacggtgacagcccggtttttcagaaatgggagcaggtagtcactgacttcaatcatatactgaataaaatcttcttttgtttttttattcttttcaaatatgattttatccaggcttgtgaactggagttttgggtgaaccggtttggagtgtcgtatgacttgcgcatacgtgcattcggtccagtccatttggaattcgaaaccgataaacgatacctctcttaatgtgccatggagaattgttaagtattgaacagctgcacaaatcgaaggttcaagcttaaactcgcctgagggtgtttgatgtccgtgctgttccataatctcgcgtatagcgcttttttcctcatcgcgcattccgtgcgagacagaggcaatcggtgtcattattccgttttttaacaccgataccgtcagaaacccgttgttagggttgaaccctgttatgcaaacataagcttgtttaaagtttttatatttgagccaatcggacgaccgcttcttttcaagccatttgctgtttgttttcttcgctacaattccttctccgtcatattttattaccatctcccagagttgatcaaaatgatcataacagggaatggattgaatggtttcttttgcgtaaggatctggagatgcaggaagctttgctgcggatatgagttcacgcagcgattttttgcggtccaaatacgaaagaagcgttacatcttctccgcttcgctctaacaaatcaaaggcgagaaagcagcacgaccgcgcgtttgccgattcctgaatcttgtctggccttttcaaacgcccccgcacttgaaggtgttcaaaatctgcacgacagggattcaccaaacatacgatttcaccgtcaagtgtcagcggaagctctttttctaggtgctgaaaggcagttttggcgaattgtatgatttcagggaaggtgctgctgagctccacaccatttctgctggttaaggtcacacctgaagaatggatgcggagaatacagcggtacccatcatattttacttcgtaacgccattctgctccgattggcggtgacgaagttaagaccggctgcatggtaaacgccatgcgctatgatgtgccggaggctttttttctagttgttttttgttttttatctccggctcctttcggttcagcggcttgtgcaggtgcggcagccggtgtctcccggttcggccttctggttctgtcgatgctggcttgcagagcgcttaccaggtcaatgacatcttcacgaggtggcgctttatcaggagtgacagccgtttctttattttctagcttgtcgttgactctttgcagcagcgcctgtcggtacgtgtcttcatatttctcaggctcaaacttagcagtcagttcatctattaatgtgatagcagtttgcagttccttatcgtttacattcgattgatcatgtacacctgggacttgagcggcgcttctgacctcatcgggataatggatagactccatgacgatacaattttcataaacgcggagaatcgccagctgctgctttgacctgattgtcatattggcgataccgatctttccggttgagcgcagcgcctcacgcagcagggtataggccttcgtcccattatccccggggccgacaaagtaggagcggttaaaataaatcggatcaatttcctgaagctgaacaaagtcaacaatctcaactgctttctcctcatgctcctgttttaagctttttaaatcttcgtctgtcagcactacatattttccttttacatattcatatcccttcacaatttcatcaggactaagagttttttcgcaatttgtgcaaactttctcgtatttgattggtgcgtgatcctctttatggaggctgcgcagtttaatatctttatcttctgtggccgcatatagcttgatggggatgtttactaatccgaagctgatcgatcccttccacattgtatgcatatcgataaacccctttttttctttagtgtgaagagaaggagtacgattcatgtgtagtaacttatgggtgaaaaaaagccggcgctgttattgcgacggctgttcaataatgaattgttcgaattgttccggaggtattggcctgctgaaaaagaagccctgcaaatggtcgcagcctttttcaaaaagaagctgcttttgagctgcattttccacaccttcggcaatcacctgcaaagacagctgatgccccatggcaataatagctccggtaatttgctctgatttaggatgggtctgaatatcgtcaataaatgatttgtcaatcttcagcctgtgaatcgggaagtccttcaaatagctaagagagctgtgaccagtaccgaaatcgtcaatactgattctgattcctaattctgttagggatgacaaaacctttttggagtgatcgagattgtccattgtcatgctttccgtcacctccacttcaagaagctgcggaggaagctggtatttattaagcgtatccttgatgaggggaatcagatctttagattgaaactgtctggcggaaatattaatggcgacagaaagatcatagcctttgtcatgccaaatccttgcctgcttgcatgcttcatctataatccactttccgatatcaataataagtcccgtttcttctgcaacaccgatgaattctccgggcggacgcagttgcccgtctggtgtcacaaggcgtatcagtgcttctgctcctgtcattttttgttttttcacactgaattgcggctgataatgcaagacaaatctatcgttttcgattgcttctctgagtaccatctcttggttaagcttaacggtttctttgttgccgattgaaaaagaatagtatctgtatttgcttttgtttcgttctttagccgcatacatcgccatatcagcctttttcatcaattcaaggccatccgtcccgtcttttggagatatcgcaatcccgatactgacagatgtgacaagggtgtgatcttgaattttgaaaggttttttgaatttttggataatttttcttgctaaaacatctgcttcgcctgttcctgtattggcgtctgttaatataataataaattcatcaccgccaagacgggcgataaatccgttatcagggactacagatgacaggcgtttagctgcaaactgaagcaattgatcaccgacattatgccctaatgcatcgttaatcactttaaaccggtttaagtcaagaaagaatacaacagtgttataatgcaaggaatgctcgcgattcagcacctttgttagatgagagatggcatgccttctgttaggtaagtctgtaagcgaatcataatgagccattctatggatttctttttctgctttgtactgcttcgtcatgtctttacaaatgacataaatgctgtctagttcctgattgacctcaacaggtataagcgtaatatttaagtgaaactggcctttttcagtgataagatcgctatcgctgttcatcgcttgtttatcttttttaacttgctcaaaaaggcgcttaaccttcagtgatgtgtaattcctccagtcatgcatgctgaagccaaatttgctgatcatttcctcaccagcgtgattggaagatattatgtctccttctaatgataaaataaaaattgcatcaatattgtggacgattaaagactgaaatcgctgttcgttatcctttatgcgttcgctctgtttaataaactttcgatctgcatgggaactgaataacaataacgtttggatacaaaaaataattaaagtaacaaaaattgaccaatgaaacgtttgcacctccatatggcttccgggcggagccatgtccttatggaaagttgccgcaagcatccctgtgtagtgcatgcccgaaatcccaatgcccattacaattgaactgacgactttatagaatataagatgctcagaatgtttttttacggccaagtcaaagaatatttttaacgagacgaaagaggctgcaatcgcaatgataattgaaactgtaaataaaatcggttcgtaaataatcattacccgggaaatggcagacattccgatatagtgcatagaagcaatagatgcgccaagcacaactgatccggtaagcagtctgtaatatgtaagaatgtgccggctgacaaaatataatgacacaaatgatcccgaaacagatgcgccaatggctgccattaaaggcatgaattcatattccatcggcatttccatatggacggccatcatccctacaaaatgcattgaccaaataccgaatcccataataagtgagccgccgatcagccaaattttactttttaagcctgtattgatggtgactttccttgaaagttcaagggaaatatacgaggcggtacaggcaattagaatagataaacatatgagagtcgtattatatgtaacgtgtatttccaaatggagattccccccgtatcgtgtgttccagtcttgttgactctctttattatcggctgcttaaccgcagagtttcagccttcaaaacgatagaaatacgagggagatctatttttagttcaactgaccgtgaaaaatgtgttaaaatcatcttgacgttttccgaaaaaacaaaaatgtataatacataaacatgaaacaagggagttggtggctatcgaagagctggttatgtcatggatagaagcatttaaaagcttatcttattttggaatatttctagcgctcagtattgagtttatcccggccgaagtcgtcttgccgcttgcgggctattgggtatctaaaggcgatatgacacttgccggcgttgttttggcaggatcgcttggaggagtggccggtccgcttacgctgtattggataggccggtacggaggaaggccgtttcttgaacgttttgggaagtatctctttattaaacctgaagcgcttgataagtcagataaatttttcaaaaaacatggtggctttgtcgcgttcagcggccgtttcttgcctggcatcaggacattgatttccataccgtgcggaattgcaaaaatgaatgtttgggtgttttcgctttatacattcattgctatgcttccgattacatttgtatatgtttatctcggtgtgaagctcggtgaaaattggaaggaagtcggctctattcttgatcaatatatgcttccgatcgggatagccattttggcgcttttcctgctctacttactgatgaaaaagaggaagaaacgcacgcactccgaacaattatctgtatttttgaaaaataaacgttgacaaatcattgcgctgcgcatatcattgacgtataaaatcatatttcttgaaatcccaaaggggagtagcgtccggaatgtattccggaaacaaagtcgtcatttcatggattgtatccatcggctttgttggcatgcctgaattcatgtctagcaagacctttgccttatgtcggcaaaggtcttttttgcatggtccggccggcataagatcggatgaagagaaagaaaacaacttttttgggagggtatcatttatggatgcagcattattattagagtatggttgggttcttctcgtcttgatcgggctggaagggattttagccgccgataacgcgctggttatggcggtaatggtaaaacatttgccggaggaaaaaagaaaaaaagcgttattttatggattggcaggggcttttgttctgcgatttggctctttatttgcaatttctttcttggtcaacgtatggcaggttcaagcgattggcgcgatctatttgctgtatatctcagcaagccacttattgaaaagatatgtatttaagaaagaagacacacataaagagacgaagcaaagcggtttttggccgactgttttaaaagttgagctggcagatatcgcgtttgctgttgattccatcttagcagcagtagcgctggcggttacacttcctgggacatcactcccgaagatcggcggacttgacggaggacaatttctcgtcattttggccggcggtatcatcggactggtgatcatgcggtttgcggcttccatgtttgtgaagttattaaaggaacgtccaagcctagaaacagcagcctttgtgattgtcggctgggtcggagtgaagcttgctttatatacgcttgcccatcgcgacatagcggttgtttctgagcactttattcattctggaacatggaagctgatattctggggtgtcttagcagcaatcgcggtttgcggctggtttatgtcaggtgggaaaaaacagccggagggcgcacaaaacgaacaaagaaacagcacccgtgaacgggcgtaatctgaaagactctgcttaaaagcagagtctttttgtgtttgaagcgttttcataagcgaaataaaataacatttttataacatctttgttacaaaaaacacgcataaaacccccttaattctttagaaaggcacgaaatcatgtataggacgtcagaatggtttgtcataattgagacattggaaatcaatatttctttttctcctttgcgaatccctatcaaattagctatcattaatgagtagttatagggaggaactgaggtgaaaccagtgcttagccttttgtttaaattgggaaaaaagaagcaaacacttgaaaaagctgttgagagtatacaaaaaggcaataaagatctgcaaaatgaattaatacagcaatataagccatttatcgcaaagacggtttcatccgtttgtaaacgatatatagatgaaaaagacgatgagttcagtattggactgatcgcgtttaatgaagctatagaaaaatattcacctgaaaaaggaaattctctgctcgcatttgctgagcttattataaaaagaaaagtcattgattacattagaaaagaagccagaagcgcacaaaatataaatatcgatttacaggaaggagacgatcaggagtcatcacaaagcctgattgaagccgagctttccattgatgaataccgccgtcagattgaacaggagcagaggcgggaggaaatcctctattttcaaaagcagctcaaggattatggtttatcgtttaaagaactgcttgaaaattctccaaagcacacggatgcaaggcaaaacgccataaaggtggcaatgacgcttgttgaacatgaagaattggccgctatcctgtatacaaagaagcagcttccggtcaaacagcttgaacagcttgtctctgtaagccgaaaaacgattgagagaaacagaaaatatattattgcgatgtgtattatcattacgggtgattatatttatttaaaagattatcttaaaggggtgctgcactcatgagaagagggattatagtagagaaaaataaaaaattcgtcacgttgctgacccctgacggacaatttttaaaagccaaaaatgatcgacacagctatgaaatcggagaagaaatcatgcttccgagtgaaacacgcatgggcagaagggccagcttttttgatttttttaaactgcgccctttcaaaatggggatttttacgatgactgctattatgctctttatttttatagttctccccgttttttctaataataaggcctatgcgtatatgacaatcgatatcaatccaagcgtcgaaatggcgttaaacagcgattatgaagtgattgaactgacgcctctaaacgatgagggacagaaagtcgtgaatgatatagatgattgggagaagactgattttaaaaaggtgattgacgatattataaccgactgcagtgaacacgggtatgtaaaaaaatcgaaagaaatattgatttccactgtttatgaaaacacagaagacaatacatataaaaaggctgtgaaaaaacagctgaatgatgtgactgaaaaatataaaacgacataccgcatggaatctctcgagtcagatatgcaaacgagggaaaaagcgaagaaagaaggcgtctcaacaggcagctacatcaaatcaaatgaaaagaatgacaataaagatataaaagatgactccagcaaaccatccggggaagaggatcaaaagagtgatgaaaatgaggatgaaaacaccgatcaaactgacacccaggacagcaagcaaggagataatgaacagctgaatgatgcggattccggagaccagaaagaagagaaagcggatgaccagattgatgatagtgacaaagataaaaaaataaaggaatcagatgaaaacacaaataccgaaaaagatggggaccatgagcaaaccccaatacaagatcctcaagataaaggaaatgaaaataacggcgttgacaagggccaaagccaatatcacagggactggaacaatggtgaacaaggcaagaaccgttcttcgtccagaagggataacgcttcagaccgacgtaatccaaacggctacagcagtgataatcattcagctaaaaatgaagattcgccgagtgcccccggcgaataaagacctgaatttatttagttgtgccatttaattgtgattgtgcttgctgtaccagccgctttgtcatttctccgcctacagagccgttagcgcgtgcgactgtatcagaaccaaggttcacaccgaattcttgagccacttcgagtttaaattggtcaagtgcctgctccacccctggaacaacgagtttatttctgctcgccatctttttcatctcctttttcgataaagaaattcttaacgcgtatttagtttgaaatatacggggtttatttatgctggcaattgttgtggagaaaaataaaaccccggcctctgagccggggtggcgcagactatagaatgtctgctgtcattttatgtgcggttgcctgaatatggaatgtcaaaatggagaggactgtaatggcgataatctgtctgattttaagccattggctgtcattcagttcttcaaaacggtgacggagacgctctgtctcctgttcggcgatctcctgcagatttgattctttcatagaaggagtatcttggtgatggatggcatcaagcacatatgcgcagctttcataataagcaatcgggctgatgacatcatcagatctgtctgagattgtgttaaaggccacttttaaaatagctcgtatgtgttcaaagtcataaatggattttaaatcacgtacaattaaaagaataactgcctgttcaattgagtattttttgcctagctcagggtgtccgatcagatctttgatatcacgctttacccagttttgaatcgcggttgactttaacgaagtcagctcgcataagttgccaagctctacgatttcatttgtagacagtccgtattcttttttctgtttttttcgttcatatcttgtaagaaattcaggaatttctagatgattggctgctttttctgctgacatgttcgctgattggacgagaatgtcgagcgggctatgttctccttgtccttttagggaatagagcagccgcaccatatcggttcgagagagtttaaaaatgttcattgttcacctctttaaacaatttgacgcggatataggtctatgtataagttcaaaattcaagcgtcagcaaattacattaacatcatacgtcgaattccttgcattttcaaatggatgttttataatttaaatatacgggttcttttgaacttaaaataacggaggttgttatggcgaaaagaatttttctgtttattctaacgaatattttggtgcttacaacaatcgggatcgttttgtctgttttaagctctgttacaggagtcgggacgtactttacagctgatggcggtatcgatccaatggcgcttcttgtgttcagtttagtcgttggatttgtcggttcctttacgtctcttgcgatatccagatggatggcaaagacgatgatgggcgtcagagtgctgaatccgaaaaaacactcgctcagctatgaggaacagcaattggttgatcgtgttcacagattaagccgctctgccggtttaacgaaaatgccggaagtcgggatttaccgttcacctgaagtaaacgcgtttgcgactggaccgtcaaaacgccgttcacttgtcgcagtatcgtcagggctgctggagcagatggatgacgcagcagttgaaggtgtgcttgcccacgaggtcgcgcatattacaaatggtgatatggtaacaatgacgcttttacaaggcatcgttaatacctttgtcttctttttatcgcgtatcgccgcttggatagcaagccgttttgtcaaagaagatctagcgccgatcgttcattttattgcaataattatttttcagattgtcttttcgatacttggcagcctggttgtgtttgcgtattcacgccatcgtgaattccatgctgacaggggaggagcggatcttgccggcaaggacaagatgattcatgcgctacggacgcttaaaagctattcttcccggattatggaagacgatcagacagctgtccaaacgttaaagattaatggcaagaagcgctcttcgcttttctctactcaccctgatttagatgagcgaatcaggcggctggaagctaaataatacaaacacattgttcctctgagagaattctcagaggttttttattttatccattgactaaaatcataaaaaaataagcaagttaagaaaatgtttcgtaaaagcctttaaaaatggacctaatatctttagaataattaccgtacttaaaaagagaggcagaaggattttacatgagattaaagtttggaaaattgatacaggccttgtcaccggcccagctgatcgcattatattattttcttgcagttactgtggccgttatattgctgagtttgccggcggcccataaaccgggggcggattggacgtttattgatgcgctttttacagctgtcagttcagtcagtgtaacagggctgacagttgttgatacagctgatacattcagcacaatagggatttttatattagcatttgttctgcaatttggcggaatcggaattatgacgctcggaacattcatttggctgatcatgggaaaacgtatcgggctgaaagaacggaagctgatcatggttgatcaaaaccaatcccagttttcaggaattgtcaatctgatgaagcaggtactgtttctgatcttgtggattgaattttttggcgggctgattctcggcacatatttcttaacctactatgactcctatcaggaagcttatttacacggattttttgccagtatcagtgcaacgacaaacggcggatttgatattaccggtaattcgatgattccatttcgccacgattactttgtgcagtttattacaatgcttttaattatatttggagcgattggatttcccgtgcttgttgaagtaaaggatttcctgttttcaaagcatcggcgttatccatttacgctttttacaaagatcacgacgattacgttcggctcacttgtcttgtttggagccattggcatctttgccctggaagcaaaccatgcgttcgcaggaaaatcatggcatgatattttgtttttgtccctgtttcaatcaacggcaacccgaagcgggggactggcaacaatcgatatcagccaattatcagattccacactcttttttatttgtgcgctgatgtttatcggagcgtcgccaagctcagtcgggggaggcatacggacaacgacttttgctttgaaccttcttgcgctgtttcattttgcccgcggcaataaggccgtaaaggtattcaaacgggagcttcaccctgctgacttgatgaagtcgcttgttgtcacgatgatggcgatcctgctcgtttttggcgcgacactcattctgaccattacagaaaaacattccctgctggagcttttgtttgaagtgtgctcggcattcggtacaaccggcctgtcgcttggaattacggcagatttgagcagtgttggaaaatgcgtcattatgattgtcatgtttatcgggcgaatcggcatcctaaccttcctgtatctgatcggaagaaaggaaattgaagcgaactatcactatccgaaagaaagagtgattatcggataggcaaaacaccgcatactttgcggtgttttttgattgccaaaaaaaagatgtgtgcctcctgttcagttggagaacctaacttcgacaggtgcaatttacgctcctgcatcttaaaatgtctgaaaactggcgaggaggattcgtatgaagcgtaaagctgaagtgaatgaagccattaaaaataacaatacacctaccgagagcatggaccccaattcatataagacacaatatcatgacgaccccaattttagaggggcaaaccgcaattccaaacagggccagcagggaggcatgtagttgtgaagaaaaaccgtcatagcagagacatgcaaaatcataaaaagcctatgaataaaaaggtgctggaggaagagttctcaagtgaacttggggattacaatgccgggaagatcatcgaaacgctggaagtcaccaagcctgaaaagaaaaaagaaaaaaacaaaaataaaaaacaaaaataaaaaagacctcttaggcggcgtccgcttaagaggtgctttttctattttaaataagcatttttgcccgttcctctgacaaattgcaataagctggtcatcctcagctcaatgaagggctgagcgactgtcttaacaaagttgctggagaggactgatgtcagggctgctgttaaaagcaagaggatcactaagctttgatagtcagtaagccaatcctcaagcccgacctgtcgtaatgtcttaataataaacccgtgaagcagatacacgtaaaatgtccgggttccccatttggtaaagaaataccgtttttgcggaacaagcgctaaaaagctgaaggttgccccaaaggcgagtacataccagccgattcgggatagtccgcttaccagggtaacgtctccaaatgaagaatacggttttgaaccaaacagaaaagaatagtcaaaatcgatgccccagcagatgacgaatactgcggcaagcactccgagcgcaatttgtttgccgcgttttgatctcaataaatcaaaatgatgtttatttaaataaaaaccgacaaggaacatcggtaagaatacgaatgtccgtgacaagctcagcgtgctgctgacaaagtccagataaccgatcagcacggcgattccgcagctgacaaacagcgcccactgctttgaaagctttgaaaaaggatataggagcaggttccaaaagaataagcttacaagaaaccataacgaccattgcggatcaatcgggttcacatttgccatgctttcatcttgcataatgtaataaaagacggaataaatgatttggaaaatcaaatacggaataatcagcttgaccgccagcttttttacatatcccgcccgtttaaagcctttcgcgaaataaccggatacaagaataaatgcaggcatatggaatgtgtaaatgaacttgtagaggtagagcataaaatgattatcattaataaaggaacgaaggatatgaccgaatacaacaaggaatatcaataaaaattttgcgttatcgaaataactgtcccgcgatttactcatagcatcaccttctctttcatcagtcactaagagattattccctgctggtacatattttaaaataaaagatgaaaaaggaatctaaaaaaatgctgattgttaggtcgatgtaaagtgatggtaaggatcgtagaaaatgtcttcgtaatgtaatggcgctgaaattttctgaaatttatagggcaaatgaaggaagttcccgcattttgtagaaatattgagggataggttttgaagaaggagtgtacatgcatggaaactcttggtgtccagacaaactcggagctgcgagaggaactgaatcgcctcaaagaagaaaacgcgcgactgaaaaaggaattgaatcagcatcaagtgattgtcaacaatacgctcgatgctatttttatttgtgataacgaaatgcggattgttcaggcaaatgaagcaacagaaaggatgcttcaagttgactcggaggatttgaaaaagcgttctgttttggattttttgttttcaatcccaaaggatgaactgaatctttccgtaaagaagttttttaaaaaaggctttctgtggaaggaggttccgatcaggcttgattgcggggcaacaaaatacatagagtttctggccaaaagaggtattggcgaggatttcttttttgttgtcatgagggacatatcttctaagaagattctggagcgggaattctctatgaatgaacagctttttaaggacttgtttgacagagcagttgacggaatcgtcctgtttgataaagatggcggttttattgatgccaatttgtccttttgtaaaagctttgaaatcaatcataatgagctgtctcatttatcgttgtatgagttcatagacagcggctcacgaaaagatttcgacaatatctggaaggcgctcaaccgcaagggaaaagcgaagggggagctgcctgtcaagcttcgttcaggagttcaaaaactatttgaattcacgattacatcaaacatcatcagcggtttttatatgtccattatgagggatatcacagagaagcggtctatggagctacagctctttaaaagtgaggagcgcttcagagaaatctttgaaaatgcaatggacgccatcatcatctggtcgaatgacggaagaatcgtaaaagcgaatcaatcagcctgtaaaatttttgagctgccgatgaatttgctgttgaaaagaaagctgtgtgattttctcgttgactcgcagcagaaatacagcataacgaagaggaaatacgcaaaatacggagagatcagagaagagctgctgtttcaaatggggaacggccaattcaaagagcttgaatttacttcaaaacggacaatccttgaaaatcagcatttgacgatcttaagaaatgtaagcgacagaaagcggatggaaaaggagcttcgggaaagcgagctgaaattcagaaaagtgttcaacggctcaatggacggcaatgtattgttcgacaatcaatacaggatcattgacgccaacccgttagcaagccatattttgggactgtcacatgaagagataaaacagcacagcttgttagatattatttctgcttatgaaatagaaaatctggcatcaccggcaaggcagattaattttgatgaaatggacaacgaaattccatttttgctgagcagcggtgataacagaaaactcgaattctcatttaaacggaatattattcaaaatatgaacttggctatctttaaagacgtaacagagcgaaaagaattggaggaacgcctgcgcaaatcagatacccttcatgttgtcggcgaactcgcagccggcattgctcatgaaatcagaaatccgatgactgctcttaaaggcttcattcagcttctgaaagggagtgtcgagggagactacgccctttacttcaacgtgatcacctcagaactaaagcgcatcgaatccatcatcaccgaattcttgattttagctaagccccaagccattatgtatgaggaaaaacatgttacccaaattatgagggacacgatagaccttctaaatgcgcaagccaatctcagcaatgtacaaatgcaacttgatttaattgacgacattcccccgatttactgtgaaccgaatcagctgaaacaggtttttatcaatatattaaaaaacgccatcgaagtgatgcctgacggcggaaatatttttgtaacgataagggcattggatcaagatcatgttcttatctccttaaaagacgagggaatcggaatgacagaagataaattaaagcgccttggtgaaccattttatacgacaaaggaacggggaactggacttgggcttatggtaagctataaaattattgaagaacatcaaggcgagattatggtagaaagtgaagaagggaagggcaccgtttttcatattacgcttcctgtcagacagaatgctgaagaaagaaggaatgatgaatgaactactatacgacagccgagacgccgctcggtgaacttatcattgccgaagaggaggaccggatcactcgtctatttctcagtcaggaagattgggtggattggaaagaaacggttcagaatactgagcacaaggaaacacctaatcttgcagaagcgaaacaacagcttcaagaatatttcgcaggcgaaaggaagacattctccctgccgctcagccaaaagggcactccttttcagcaaaaagtgtggcaggcgctggagaggattccatatggcgaatcccgaagctatgcggatattgccgctgcggtcggcagtccgaaagcggtgcgcgctgtcgggcaggctaataaacgtaacgacctgccgatttttgtcccgtgccacagagtgatcggcaaaaacagtgcgttaacaggatacgccggaagcaaaacggagatcaaagcatttttgctaaacatcgagcgaatctcctataaagaaaaataaaacatatggcacgttcccttttttcacggccgacatatcattttattaagttaaaaaagttggtctgatgaaaaaggaggacaaagcaattgaagccgagccgctctgagaaacttgccgtttttgccgaactgtttgtgaaactgcatatcttatcaagcgctcaaaaagatgaaatcatcaatgttaacaaaaagaaacaaaaaaaccgctgactcggctccaaatgagcaaagtccagcggttttttaatgcaccttttctcctctaaacagctgttcaatctcttcttcatagtttccggtcataatccctttttctgtgatgattcctgaaatgagatcatgaggtgtaatgtcgaaagcgggattaaagacaggcacattggatggagcggtccgaactccggaaatctgcctgacttcctcgggatcgcgttcctctatcgggatatcagcgccgcattcgacctttgtatcaaatgtagataaaggtgcggcgacaaaaaacggaatatcaaaggcgtttgctaaaatagcaagaccgtatgtgccgattttatttgccgtatcaccgttctttgcaattcggtcggctccgacaataacagcggaaatttgtttttccttcatcgtatgggcagccatgctgtctgtgattagagtgacatcaatgcccccctgcatcagctcccaagcagtaaggcgtgaaccttgcaggacaggccttgtttcacaggcataaatgtgtaatcccaaatctttttgtttggccaagtaaaacggagctagcgccgttccatagcggcttgtcgcgattgagccggcattgcagattgtcatgatcctgtcgccttttttgaaaagctgcagggcgttttggccgatcaaccggcacgtttcctcatcctcgacctgaatctgaatggcttcatggacaaggtttgtttttgcttcatttacggaaatcgcgttttcgaccgaatgactcagtctctcaagcgcccatgacaaattaatggcggtaggccgtgagctgtttaaatattgtttgatgtcttccagtctgcggcggaattccgtgacattatctgtttcaatgtttttggcagcaagcgccagtccgaaggcagccgtaatgccgatcgccggagcgccccttactttgagcgtgacaatcgcatcaaatacatcctctttcgtcgtcagctccaaatattccgtctcatcaggaagcttttgctgatttaaaatggtaatagctgtttctttccattcaacagaacgtggaacagcaaatgaatgggtcatgaatagatcattcctttacaagtaacttaaataattcaataacatctgttatcgttttgaattccgaacgtttttcgataaaggctgtgccggtttcgagcgccaagcgttttctgccgattcgtttatcaaacggcacgatcgtatccaggtcagctacatgggcaaggccgatcgtgcgtcgtatcagctcacagcccgcaaatccgattgcttcttcaaaaatatggctgagcgtatcagtgaggtaaccgtcgatgttggcgtaaacatccagactgtccttctgccaggattcactaaacgtctcttcaaacgtttcccagacctttttgacatgttcatataacggctctctgtcagccccgtcacggctgagtgcgttcaaaaataagttggcgataaattgccctacatcaaagccgatcggtccgtaaaaagcaaactcaggatcaatcacctttgtttcgtgctcacttgcgaaaatgcttcctgtatgcaaatcaccatgaatcaacgtttctgcagacgttaaaaatgactttttcagcttagcggcttcgattttaacgctgtcattattccaaagcttttcgacaaaaggacgaagctcttcttcaaaatcatttgtgtcatggtcgaagaaaggatctgtaaaaacaagtctttccgtaatgtcgcatagctctggatttgtaaactgtttaacaagctgttttttcaccttaggttcaagcgcgtaatctgatgagtagaaaagtgtttttcctaaaaattcaccgatgtgctgcgacagatgaggatagttttcacccttaatgagtccttttcttgcgatcttgaggtgagagagatcctccatgacggtaaccgccatttccgtatcagaataaaacactcttggaaccaggtgaggcacatgctcgccctgacggatgagagcgctgctttcgattcttgcacggtcgattgtcagcggccagctttctcccaccacttttgcatacggaaccgcctgtttaatgattaatgctctgtcatgttcttgatcataaatatgaaaaacgtaatttaagttgccgtctccgatctcctggcatgtcagcgtgcttttgcttggaaaaaggccaagcttcaccgccaacgccacagcggagctttcatttaacgtttcgtataaaggtgtttttgtgactcccatcatcataacctccaattatgtaatcacttaatatgtagccgtaaaaaagcctccttctcagagagaaggaggcttaacagtctatgtccgcctctcttatctctcagatcagatctgaatggaattagcaccgtgccttaagagaccagcgtctcggcgcgaaaaagatgcgccccatttcacaatggaattacggtcggttgctgttggggtcaaaaggccaaatccctcgcccaactctcgataagagaatatattcacttgtttgacaattctaatttatcagttgatgaacatggtaacaggtaatttagttagttgtcaatattttttaatataaatcttttctgatatcatcgaaaacaggaatgctctcccgaacttctgcgctttcttgaaggtcgatttccgctcggactatgccttcttcccggccgccttcagcaagtacacgtccccatggatcaataatcaggctatgtcctgcaaattcattatccggatttgaaccggtacaattgcaggctgcgacaaagcattggttttcaatggcccgcgcaataagcaggcttttccaatgatcaaggcggggaagaggccattccgcagaaataaacagcacgttggcgccttttgtcgtatgttttctgatccattccggaaaacggatatcgtaacagatcaatccagagcttttgacgccgtcaagctcaaagtatccgtcttcggaaccggctgataaatacagatgctcatccatcagctgaaaaagatgggcttttctgtactctttaatgatttgcccttccttatccgcaatgtacattgtattataaacatcagaattcttcctgacagcgaccgacccggcgacaatatgaacaccatgtttttttgccgttttcttcagccagctctgagcggagcgcccgtcttcgtcagcgagttcatcaagattggccagatcatatccggtcgtccataattcaggcagaacaagaacatcagcatgtttgctttctttttcgatgaaaaattcagccttttttatattttccgaaggtttgccgtatgaaatatcaaattgaagacaagatatcgtccatttcatctttttaacaccccaaatttttctttacttttttcatttaaccatatatgatgatggactatcatttcaagatttttttagaaggtgagaatagatgaaatttgaacagtctcatgtattgaaggaattgcctaaacaattcttcgcttctctggtgcagaaagtgaaccgaaagctcgcagaaggacatgacgttatcaatctaggacagggaaatccagatcagccgactcctgaacatattgtcgaggagatgaaacgagctgttgctgatcctgagaatcataaatattcgtcttttcgcggctcataccgtctgaagtcagcggctgctgcattttacaaaagagagtacggcattgatctggatccggaaaccgaagtcgctgtattattcggcggaaaagccggtcttgtcgagctcccgcaatgcttgttgaatcccggtgatacgatcttagttcccgatccgggttatccagattactggtcgggtgtcacacttgcaaaagcaaagatggaaatgatgccgctcgtaaaggacagggcgtttctccctgattacagcagcataaccgctgaagtaagggaacaggcgaaattgatgtatttgaattatccgaataatccgaccggagctgttgctacttctgagttctttgaagacaccgtgcgttttgcgactgaaaatggaatctgcgtcgttcacgattttgcttacggcgctgtaggatttgacggctgcaagcctttaagctttttgcagactgaaggtgcgaaggatatcggaattgaaatttacacgctgtcaaaaacgtataatatggcaggatggcgggttggctttgccgtcggaaacgcttcggtcattgaagcgatcaatctttatcaagaccatatgtttgtcagtcttttcagagcgactcaagaggctgcagcagaggcactgttagccgatcagacgtgtgtggcagagcaaaatgccagatatgagagcaggagaaacgcttggatcacggcatgccgggaaatcggctgggatgtaacagctcccgcaggttctttttttgcatggctacctgtgtctgaaggctatacttctgagcagttctcagatcttttgctggaaaaagcgaatgtggcggttgcggctggaaacggcttcggtaaatatggcgagggctacgtcagagtcggacttttaacaagtgaagaaagacttaaggaagccgcttatcgaattggcaaactgaacctgtttacccaaaaaagcattgacaagaccttataacgatgggataattcaaaataatttataaaatctatattttcttatcaagagcaggcagagggacgagcccgatgaagcccggcaaccgacttataaagcacggtgctaattcttgcagctagcggctgagagataagattcggacgagaaacgaaacctctttagacgcgattgcagtttgaagaggttttttgatatggatgaaaatgaaaggagctctggcatgagtgagttattagcgacatatctcctgaccgaaccgggagccgatacagagaagaaagcagaacaaatcgcaacaggattgacagtaggctcctggactgatctgccccttgtaaaacaggagcaaatgcaaaagcataaggggcgggtgataaaagttgaggagagagagggaactcctgcatcagcaaaacaagcggtcatcacaattgcctatcctgaaatcaatttttctcaggatattccggctttgctgacaacagtgtttggcaagctgtccctggacggaaaaatcaaattaatcgatcttcacttctctgaagcatttaagcgtgcactgccgggaccgaagtttggcgtatacggcatccgaaagctgctgggagagtttgagagaccgctgttaatgagcatatttaaaggcgtaatcggaagggacctgagtgatattaaagaacagctccggcagcaggcgcttggcggagttgacttgattaaagacgatgaaattttctttgagactggtctagcgccttttgaaacaagaattgcagaaggaaagcaaatattgaaagaaacgtatgaacaaaccggtcataaaacgctgtatgcggtgaatttgaccggacgtacggctgatctgaaagacaaagcgagacgcgccgccgagttgggagcggatgcgcttttgtttaatgtcttcgcttacggcttggacgttatgcaaggccttgcagaagatcctgaaatcccagttccgattatggcgcatccagcagtgagcggagcgtttacgtcttctccgttttgcggtttttctcacgctcttttactcggaaaattaaaccgatattgcggtgctgacttcagcctctttccgtctccatatggttcggttgcgcttccaagagcagacgcactggcgattcatgaagaatgtgtgagagaggatgcttttaaccaaacatttgcggttccgtcagcaggcattcatcccggcatggttccgctattaatgcgtgatttcggcatagaccacattattaacgccggaggaggcgtacatggacatccgaacggtgcccaaggcggggggcgagcgttcagagccattattgatgcggtcctagaggcccagccgattgatgaaaaagccgaacaatgcaaggatcttaagcttgcgctagataaatggggaaaggttgaagccgtatgacgactcgaaaaccttttattatttgtgattttgacggaaccatcacgatgaacgacaacattataaatatcatgaaaacatttgctcccccagagtgggtggcattaaaagacggcgtactttccaaaacgctgtcgatcaaggaaggtgtcgggcggatgttcggccttctgcccagccgtttaaaagaagagattacaagttttgtattggaagatgcaaaaattagggaaggctttcgggaatttgtagcatttatcaatgagcacgagattccgttttatgtcataagcggtggaatggacttttttgtatatcctttgcttgaaggcattgtggagaaagaccgcatttattgcaaccatgcttcatttgacaatgactatatccatattgactggcctcattcctgcaagggcacatgcagcaatcaatgcgggtgctgtaagccgtcggtcatccatgaactttctgaaccgaaccaatatatcatcatgatcggtgattcggttacagatgtggaggcagcaaagctgtctgacctatgctttgcaagggattatttattaaacgaatgccgggagcaaaacctcaatcatcttccgtatcaagatttttatgagatcagaaaggaaattgagaatgtaaaggaggtacaggaatggctgcaaaacaagaacgctggcgagagctcgctgaagtaaaacgggaattggcagagagagattggtttccggcgactagcggtaatctatcaattaaggttacagatgagcctttaacatttctcgtcactgcaagcggaaaagataaacgtaaagagacggttgaagattttctgctggtcgatcaaaacggagagcctgctgaaagcgggcattctctgaaaccgtcagcagaaacgcttttgcatacacatttgtacaataaaaccaatgccggatgctgcctgcatgtccatacggtaaacaataatgtgatttcagagttatacggagaccaaaagaaaatcacattcaaaggccaggaaattataaaagcactcggcttgtgggaagagaacgcagaagtgaccgttccgattatagaaaatccggcacatatcccgacgcttgcggcactgtttgtggaagagatttcagaagattcaggagctgttctgatccgaaatcatggtattacggcttgggggaaaacagcatttgaggcaaaaagagtgcttgaagcgtatgaatttttgttcagctaccatttgaaattgaaaacactccagcatcagctggttaaataaaaggaggaattgaaatggctacaattcgaattcatgatgaggcaaatacaacgattgaaaatcaagaggaagtggcaagctttctggacagtcaagaggttatttatgagcaatgggatatcacgaagcttccggaacatctctcagagaaatatgacctgacagaagaagaaaaacagcaaattcttgataccttcgaaactgaaattaaagatatctcaacccgccgcggctataaagcacaggatgttatttcattgtcagacagcaatccgaaacttgatgaactgcttgaaaactttaaaagagagcatcaccatacagacgatgaggttcgttttattgtaagcggacacggtatttttgtcattcaaggcaaggacggcacgttttttgatgtccgtttaaaccctggagatttaatctccgtgcctgagaatatccgccattacttcacgcttcaggaggaccgcaaagttgtcgcggtgagaatttttgtcacaactgaaggctgggttcctatttatgaaaaagacagcgtgaatcaataagcatgagatagccccgttcatcgaacggggctttttatatttattgcaaacgccacttttcatactgtgacagttcttttttaatcattgtccaaatcaaacctaaaacagctgcatcgtcaatgaatccaagaccgaggatgacgtctggaatgatatcgagcggcatgacgatatacaggattgcggcagttaacagcaaaagtgttttaacctgtgaacgagggtagtcgccatttcgccaatcgcgaagcatctgaaaaaaagtagtgatgtgctggatacatttttttcggtttttcctcttcaaaattgcttttccgcctgccgctccgagcataattgctttctttttcttcattgggcatacctcctgcctggcggcgtgtttaagatattcttcacctgggtattgttcttctaatcctatcaatatatctattatacctgaaaaattaacttatttaatgaaaatatgtttacaaataaagtataatctgtaataatgcacaataacccaatcaaacttgtttcctatttcttagcggcgaggggtgaagtgaatgggcggttcttctgaacaagaaagattgttggtgtctattgatgaaaaaagaaagttaatgatagatgccgctagaaagcagggatttacagggcatgacacgatcaggcacagtcaggagctggattgtttaataaatgaatatcaccagcttatgcacgaaaacgaacattcccaagggattcaaggccttgtaaagaaattaggcttgtggccccgcagagatgttatgccagcatatgatgcaaataaatagcggcctatcagatgcatatataaagagagagcttttcggaagcgctctttttttctggaaaaaattcatatgaaagggggaactaatgaaggaactggcgattctcattaccgaaatggtcaatcaatttcatgatgcttttatttccttatgcggaatatttggcatttatttaactgacaaagaaatgcatttttgggtgatcggcatttttggcatattctttttcggcgtcactcacgctgtgtttacatggctttctaaatggagtatgacagccttgtcctttatctataccgttacagtcatcattgtcatcgtatttgcgattgagattcagcaaaaggtgacggggagagggaatatggagtttttagatgccacggaaggtataaagggttttttagtattttttatgttttttttgcttttgaaaatgctgttgcgtttcatcaaaatccttttttctggaagaccagcaagcaaatcgaatggcaatacccgatcacgaagataaaaaaccctcctgacatggtcaggggggttatgaagcggatacagggagggtgattgtcacctctgtgcctcttcgcacttcactttcaatatgaatagagcctccgtacatcagcacgatccgtttacaaacaacaaggccgagaccggttcctttttctttagaagtaacaaagggaaggaagatgtgatccagcatttcctgagaaatcccttcaccgttatccacaactttgattatggcttttttatctaaagctcccagggagatcgtcagtttgcctccttcaggcattgactcgaggccattttttgctacatttaaaatcacttgtttaatatgatcttttgtacattttacgagtaagggctgctcggttaaatactgtaattcgacttcaacattgtatagattgccctcagaataaatgatcggcataatttctccgataatgtcctgaagtgagttcagctcccatttttcagctgtcggcttgccgagaacaagaaactcactcactatttgattgatgcgcttgatctcctgttcgataatggagaagtaaagctgatcttcctcacctttatatttcttttgcaacagctgaataaagccgcttatgccggtaagaggattacggatttcatgggctgtgctggcagcaagcgtcccgatcagctctaatttttgcgcctcattttctgagcgctccagctgggtctgccgcttcagcaaataatacagcacgagaataaaaaggatattcagcagaacaataatacatgaaagcggaagcacaaggcttttcgtcagttcttctattgtgaccgggttcggatagactttcatattccagctgatatcatccagatatccgctgacaggtttctgatcctctgcatgagatgcttgtccgctcgcaaaaatcattttcccgtcttggttcacaacttcaatataaacatcagggcttagtaagttaatgagatttttcaaataatcaatttgaatagctgcgacaagataatctgtcacattacgttttgagtccaaaacagggacacaaattgtgaaaattggctgaccagtaattctgctcgaataactatctgaaatgactgtctttttagtttcctttgcttttgtaaaaaaagatctgtcggccaggtttacattcgtttttaattcggttgtgcttgcggtgacgtctcctttggcattgagaaaatagagaccggaaaatctcggctctgaatcaaaggtcttttccaaaattgactgcattttctttatatcaaccggtctgtcaatggcgatggacaaggaggtcattctcgccattgtttctccgattaaataattgattttgttgcggtgaaggtttagcaggacacttgcttcttgtttatgttctgcagctattgtatctttttctttttcatatacgaaaaagctgatgacgattgccggaatcacgaccagtatgatataaagtttgactctcccgcaggcgccttttagtattttcaatttgcatcgctccaacatacacctgattagaggtattatatcattgtttcttcttctttaataagaaaaaataaccaaaaaaattagaaaaaggtgttggcaagcttacattttaaaaaagaagagaaatattggaaagatttttattgacattttggtctttgtttattaatgtttctctgtaacggtttctaaaaggatgattgagacatgacagaaaaatcactgaagttatttatcgtgctgtcgcgcgcgtatcggtctattaacgatcatatgaataagcatattcataagcatgggctgaatccgactgaatttgctgtgctagagcttttgtaccataaaggcgatcagccgctgcagcagataggagataaaattctcttggctagcgggagcatcacatacgttgtagataagctggagcaaaaagaacttctcattcggaaagcgtctcctacagacagacgagtgacatttgcgcaaattactgaaaaaggcatcggtcttttgaacgatattttccctgatcacgctgctgaaattgatgaaatgatcagcgtattaagcgaagaagaggtagagatgtgcaccgaaatgttaaaaagagtaggattaaacgcaaaacagtttcataataagtaaaaaaaggaagcctgatatgtcacaaggcttccttttttgctatttttcatttgtttccgctgcgcctctcggcaaaatgagaacttcaacccgccggtttttgcttcggccttccgcagttttattggaagccaccggtttatactcgccataacccttggcgctgaacacttttgcatcgagcttggggttttcaatcaggagccccataaagtttaccgctctcatgacgcttaaatgccagtttgattggaattcagaatttttaattggcatattatcagtatgtccgctgataatgatatttcttggcgggttaatcacaagaagatttgaaatctcttttgcaagcggcacatcttccttacggatggtcgcttttccagaatcaaagaagatgctgtctttaatcgtaatcagaaggccttcactagtcatcttcgtctccagctgatgttccagctttttatctttgatgaacttttccacctggctcttcacattttcaagttcttcttgatcagctgctttttctttttctttcttgtttttctctttctcttctttttcctttttcacttcatcgatgccgtctgactcgttttcaggaggagtgacactggagtagtccagtacaccggtgccgcctgtaaagacttcattaaatgattttgagagcatttgaaacttagctgcgtcaatcgagctgctcgcgtacagcacaataaacaatgccaggagaagagtaaggatgtcggcgtaaggaacgagccatgattcatcaacgtgctcgtcctcatgcttcttcttcttttttctcgccattttgcgcctctccttgttctgcaaatttcaagcggtccttcgcaggaagatacattaaaagcttttgttcgatgactttcggtgcttgtccttctaaaacggataaaacaccttcaatcatgacctcacgcagttttacttcttgttttgattttcgttttaatttatttgcgaaaggatgccataacacataccctgtaaagataccgagaagtgtggcaacaaaggcggcactgatggcgtgtccaagctcatctgtattgtccatatgagagagagcggcaatcagcccgattacagcgccgagtactccaagtgtcggagcgtacgttcctgcttgtgtaaaaatagcggctccggcttggtgtctgtcctccattgcttcgacttcctctgtcataatatctctgataaattccgcgctttgcccgtcaacagccatgctgagcccgtttttcaagaaagcatcatctacatcctcaatgcttgcttctaaagcaagcagaccttcgcggcgtgcaagctgagcccattcagagaacataggaatgagttcctctattgtgagctgtttattttccttaaataacactcgaaacagcgcaggcacttttttaatttcttttgttgggaacgcaataacgactgctgagattgtcccggcgataataattaaaatggcagcggggtttgcaagggcgctgaaactgacgcctttcagaaccatcccgacgctcaatgccacaaaagcaagaataataccgattaacgaagttttatccatagtttttcaccaaatccttttttactatcttgtctatggttaatatcggttttggtgcccggaactttagggacattgtgaatttgttcatgaaatattcaaggaagaggcatagaagggagaaataaacaaaaacgggctctccaaaattgaaaagcccgggtgtctactgaaattagcagctttcttgcaagctgtccttcagatggtattcatataatagtagaaatacatattcactgtatataaacatgttccatccctccttaaaaaaagtgtaaaggatgaagggaagtagcgcttcaggggaagggacggtattttctaagtcaagagtatgaaagcataaaaaaagcggcttcctaaaaggaaaccgctgattgttatttcgctcgcactttgattttatcatcttctaaaatcacgtgaaaacttgtgatctcgccattatcaagcagcagatcggtcatttcatcctcaacccattcttggatggttcttctaagcggacgtgcaccgaatgaagggtggtagcccagctcagcgattttttctttcgcttcatctgtcacattcaagctaatgccccgttccgccaatgtttcttcaagttctccaagaagaaggctgacgattttgacaagatgttctttttccaatgagcggaactcaataatgctgtcaaaacggttgaggaactcaggtttaaagaacatgctcagtgaatcaattaatgtttgttcttcgatgacactgtcatctgattggaaaccgactttcgtttgtttctcaccagcacccgcattacttgtcatgatgatcacagtgtctttgaagcttacggttctgccttggctgtctgtcagacggccatcttccataatttgcaggaacatatgctgaacgtctgggtgtgctttttcaatctcatccagcaacacaatgctgtaaggattgcggcgcactttctcagttaattgtccagcttcctcatggccgacatatccaggcggtgaaccgataattttagatacggcgtgtttctccatgtattcgctcatatcgagtcggataatagcgtcttttgtgccgaataattcatctgccagtgttttagaaagctctgttttccctacgccggtaggaccgacgaagaggaaggagccgactggtctgtttttggattttaaaccggcgcggcttcgtcttaccgcctttgccactttttgaacagcggcttcttgtccaatcacgcgttcatgaagttttgcttcgagttctttcattttcgtttgttcgtctgcctgcagtttgccgacagggatgcctgttttttgttcaacaatttcctgaatgtgctcagcttccacagtgacagcagtatgagcggaggagctgttcagttttttctccaatgcgagttcttcatcacggagttttgcagccagttcgtaattttcttcttccagggcttttgttttttcggcttcaattgcagttaagcgttcagcggcatcctcatcattcagttcatcaattaacaggttagcttttgaacctgcttcatctaataaatcaattgctttatccggcaggtgtctgtcctgaatgtagcgggatgataaagtgacacacgctttgattgcttcatcactgaatgttacgccatggtacgcctcgtatttgtctttaatcccttgcagaatgaggatagcctgttcaattgaaggctcctgcaccatgacaggctgaaaacgtctttccagcgcggcatctttttcgatttgacgatattctttcagtgttgtcgcgccaatgacttgcagttcgcctctggctagggccggtttgagaatgttgccggcgtccattgatccttctgcagagcctgcgccaacgagaaggtgaatttcatcaatgaacagaatgacattttttcgttccttcagctcagtgatcagctgtttcattctctcctcaaattggcctctgatccctgtgtttgcaacaagggatgcaacatcaagcaaatatagctctttgtttttcagtttgtttggaacatcaccttcagcaatttttaaagcgagcccttcagcgatggcagttttccctacacccggctcaccaataagaaccggattgtttttgttccggcggtttagaatttcgatcactcgcgccacttcatcatcacggccgatgacgggatcaatgagaccggctttagcaccgtttgtaatattttgagccagctcatcaagcagccctttttttccgctttgttttgctgcgctcttttctttcggctggaatgcctgttcaaacggaaatccgaaagattgaggacccatactcattgaaggtttacgggtcagttcgttatagcaagtttcacaaagaaccatctgtttatgaacggaatttatttgcatgttaaggcgaatcgtcgcctcgttttgatgacaatgttgacaacgcatttgccaaaacctccttaataatttgatcttctttgaccaatgaaagtgaataaaaaggtctattggatttgaccttctttgactattagtatacggcaaacttaacggctttcaaaccaatatgctcaaagcagactgaatatttgactatctttgaccaattggtttttaaaaaaggccggtttgtttgaccaactttgattaatagtatactctgaccatctttgactttcaagccttttgcacaacattttttaatttgttacaaagtaaaacatgttttcttcgtcttttcaaggaacttgtctcataggttataaaaaggcatctatggacaaaactgcggttcgttcggaggggagaaatggaacaatcaaaagggtctgcaagtcagcttgcttttgtgtatgtcggcacagtagtcggagctggatttgcgactggcagagaaattgttgagttttttctgaagttcggctggttcggtttattcggcattctcgtcagcggcggaatgtttacgtttctgggcgccaagctgatgatcatttcaaagcgaatcaatgccaagtcatatcaagaaatgaacatctttttgttcggggcggcggctgggcgaattatcaatgtatttatgctgtttgttctcctcggagttacatctgtcatgctttcaggagcaggggcgctttttgaggaacaattggggatgtccgctcagattgggatgcttattacaatcggtctgagcttaattgtgatgactagaggagtaaaaggcattttcggtgtcaatgtgtttgttgttccccttttaatcctcttttcaatgattgtagtggccgactcttttatattcagcgaatcacgaaacgcagctcagtgggtctggccgcatcgctgggattggctgttatcagccttttcttacggggctttgaatttatcgcttgcccaagcagttttggttccgctggcgaatgaaatgtcctcggagaaagtgatcaaaaaaggcgctttaatcggagggacgatgctgacgattgtgctgtccgcgagttttctgtctttgtcaactcttccggatgtatttttgtatgatataccgatggcacaagtggtttatctctttgcacgatctgtccatttgatttatttactcattattttcggagaagtgttcacatcagttatcggtaatctatatggattagaaaaacaagtgcaaagctttcttccagtgaaaagcaaatatatctttgcggccattatgatcacggcttatattacgagccaaatagggtacggcaggcttatttcaacgatttatcccttgtttggctatgtgagcctggccttcataggcgctttgctttgcaaaaaagctcctcggcggcgcagtttataaatatatataatgaaacgaaccgtcactatagagcgataattgatctaggaaccggggactgacttttttattgtcaagaaaaacatcattatggtaagatagcagaagtgaaaaaattgaagaaaatccgtgcgatatgcgggagaggttctagctacaccctctataaaaaactaaggacgagctgtatccttggatacggccttttttatgtttttctagagcaccttccgaaaaaaggtgtttttttgcgtgaattagctgtagcgatgtctctcgccggcgtttttattgcggagaaggagaggaatcatgaaaaaagaaaaagcaattgtcgtatttagcggcggccaagacagcacaacatgcttactgtgggccttaaaagaattcgaagaagtcgaaacggtgacttttcattataatcagcgacattcgcaggaaattgaagtggcaaaatccattgcggaaaagcttggtgtgaaaaatcatttgcttgatatgtcacttttaaatcagcttgcaccgaatgccctgactagaaatgatattgagatagaagtaaaagacggcgaactgccatccacattcgttccaggccgcaatttggtattcttatcctttgcgtctatcctggcttaccaaattggcgcgcgccacattattacaggagtttgcgagacagacttcagcggttatcctgactgccgtgacgaattcgtgaaatcttgcaatgtcacggtaaatctggcaatggagaagccgtttgtgatccacacgcctctcatgtggctcaataaggcggaaacgtggaagcttgcagatgagcttggcgcgctggattttgtgaaaaacaacacgctgacatgctataacggcatcatcgcagacggctgcggcgaatgtccggcatgtcaccttcgttcaaaaggttatgaagaatatatggtgatgaaaggagagcgtgcataaattgttatctcaaatttatccgcaggcccagcatccttattcgtttgaactgaataaggacatgcatatctcagccgctcattttatccctcgggaaagtgcgggagcgtgcagcagggttcacgggcatacgtataccgtaaatataaccgttgccggcgacgaacttgacgattcaggctttcttgtcaatttcagcgtactcaaaaaactggtgcacggaaactatgatcacacgctattaaatgatcatgaagatttttctcaggacgaccggtattcgctgccgacaactgaagtcgtggcgaaaacgatttatgacaacgtacaggcttatttagacactttggagaataagccgacctgtgtacaggtgtttgtccgtgaaacaccgacaagctactgtgtctaccgtccgaaaaagggtggtttgaatggctaaaggaattcctgtattagaaattttcggcccgacgattcaaggagaaggcatggtgatcggacagaaaacgatgttcgtccggacagccggctgcgattattcctgcagctggtgtgactccgctttcacttgggacgggtctgctaaaaaagatattcgctggatgacggcggaggagatttttgcggagcttaaggacattgggggagatgcgttttctcatgtgacgatctcaggcggcaacccggctctgttaaaacagctggatgcttttattgaactgctgaaggaaaataacatccgtgcagcgcttgaaactcaagggaccgtttatcaggattggtttacgctgattgatgacctgacaatttctccaaaaccgccaagctcaaaaatggtaacgaactttcaaaagcttgaccacattttaactttacttcaagagaatgatagacagcatgctgtcagcttgaaggttgtcatctttaatgatgaagatctggaatttgccaaaactgtgcacaagcggtatccgggaatcccgttttatttacaagtcggaaatgatgacgtgcatacgacagatgatcagtcactgattgcacatttgcttggaaaatatgaagcgcttgttgataaggtagctgtcgatgcggagctgaatctcgtcagagtgctcccgcagctgcacaccctgttatggggcaacaaacgcggagtataatagaaaggaagatgaacatgacgacaagaaaagaatcagaattagaaggtgtaacattgctaggcaatcaaggtacaaattatttgttcgaatatgcaccggacgtgctggaatccttcccgaataaacatgtaaaccgtgattactttgtaaaattcaattgcccggaattcacatctttatgtcctaaaacaggccagcctgactttgcgacaatctacatcagctacattcctgatgaaaaaatggttgaaagcaaatcattaaagctgtatctattcagcttcagaaaccatggtgacttccacgaggactgcatgaatatcatcatgaatgacttgattgaattaatggacccgcgctacattgaagtatggggcaaattcacgccaagaggcggaatttccattgacccgtacacaaactacggaaagcctggcacgaagtatgagaaaatggccgaataccgtatgatgaaccatgatttgtatccggagacaattgataatcgttaattattccgttgtgtgatacggagtgtaaaaggaagtggagtcacagtaaaatccgaacattcagcgttaattttcagcgaagtgtgaccggagtgtgacccgcactaagctcaataaaagtgggaaaagtcacacctgaaaatggctctactcatgggaattgtattaaaaagtgtgacctgaggtgcaacctgaactgtgacttttatgcagtgaaaaattgatagtacagaagcagattaaggcgtacaatttgtacgtcttttcttttttatccgaaagaaaatatgcctatctagagatcataggcattaaatattattatcaatatcttcatttattttttggctaagtttctgaaccttctctttaacatttgaaacagctcttttttgaatttcatcaaagttctcctgaatatagtcgatgacacttcttattagaacttcactttcaaaattgaatatctcatttatttctgactgttcttcatctgttaggtgatggtattgaagttgtttagcatttacttcagtagctacatcaatcctaacttagttgttctggttgtacaatttcatattcaccttctgtatacttttgctccgcataatggcttccccattgacagagctcctgcaagataggtttaagagattctccaagttcagtggatgaatattcaaccttcggcggtacttgattatacatctttctgctcacaagtccactggcttcaagctctctaagtgtttgaatcagcattttctgagttatatttgggataatgcgctttaactcactcgttctctttggtccattcattaaaaagtataatacaaggcctttccattttccgccaataacttcctttgtcacttcaaacccacagctaaattttttcatgtctaaagctctccattccacatttattactttttagttactatatcacaaaaaagtgggtacttccgataatgggcttactgaaggatactatatcttgtaagttgttcttcaagtacttaaaggtactagacataaaataaaataattctaaaggagtgttaagtatgggtaaatttgaaggtaaaatagcgcttgtaacgggtggaacaagtgggattggtcttgctacagcacaaaaatttgtaaacgaaggtgcatatgtttatatcacgggacgtagacaaaacgaacttgataaagctgttaaccaaattggcaagaacgtaaccggtgttcaaggtgatatttctaagcttgaagacttagacaaactatatgacattataaagcaggaaaaaggtaagttggacattctttttgctaatgcaggcatcggcaactttcttccattaggtgaaattactgaagagcaggttgatagaacgttcgacattaacgttaaaggaaccatctttactgttcaaaaagcgttatcactattcccggacaaagtaggttctattattgtaacgggctctactgctggatcaattggcaacccagcgtttagtgtatatggagcatctaaagcagcattaagagcactggttcgcaactggattcttgacctaaaaggtactgaaatccgtgtaaatgtggttagtccaggaggtattcttacacctgcctacgatgagctttttggtgatgcacttgaagaagtaatggaaaatagcagaaatactgttccagctggaaaagttgggacacctgaagaagtagcaaacgctgtatctttccttgcttcagacgaaagcagttacttgacgggtgttgaattgttcgtagatggcgggctagcacaggtataatttcactgcgcagagattacaaatagtccccaaaaaaggttaatggggatttacttgaagaagtcgtataaaaaagtcgttttccttaaaggacagggaattcgacttttttatgtttgaatttgattaacgttgtaaattcgcattttcctggggctaccactaaatgacctgtaaaaaagattacactgtgaataaatgtacttaaagtaacgggggctcttgacttttaataaaaaataatatccctgtccttgtattctaatacttttgaaaatatttaaaggaatccttatgtcctgaataaccacataggaaaatatgttgtaggttgctttctttttttgtggggcatcccacacaagctatcttgtgatctcacacctgaacgttttttatagactagtaccgcgacaagttatattacatatacataccaataaagtagacattaaaagtgaaagagaggatggaaatgtgtgaaaattcttttccttgagagtcatcccatgtggctctatggtttaccgaatgggtttagggaagcaggacataccgtaatgatttccggtcctgtaagtcgggaaaatatcactgaaatgatagacgaatttaaaccagatctaatagtatctatgggatggacaccagagcattcaagggaaaagcaggcctggattcgcaacgctactaaaaaggtgaatatccctctcgtttattgggctactgaagacccgctgcacactcaaaactttactatcccgttaattaaaaagatgaaaccagattttgttttcacggttacgccttctctgtgtaaaacttatgaaagcatggggattaaagcagctcacttagattttgcatttcacgaaagtatacatcaccagattaaaccattagcaaaatacagttgtgatatagcagtggtggctaatgcttaccctaattttcttgaagaacatccggaagtgttccgttcgtcctctttaaaaacgcttattcgtcctcttatacggaagggtattcgcattgatttttgggggagaaactgggaaaaaatgagtaaatatataggaagagaaattccccccaattggatccatggataccttgattatactgaagcatataaagtttacagttcagcaaaagtcgttatcggtttgcaaaactgtgaaagccaacttacgcaacgcacctatgagattcttggttccggggggtttttattgacatcggatacaccagcagttcgaggtaaattcaaatctggccgcgatctcatcgtttcttcctccccaaaagaaacattggaaaaggttaaatactatttgaatcatgatagcgagagaaaaaagattcagataaacggtaaaaaggctgtaaagaatgattcctatcggcatagagccgagagaatgcttgaggtgctaaaaagcagaggaattataagaaacttaggggaaaccattcattatgtagatgttctcaaagaaaaatacctgatccatcatgttactcccggtgaaacattatcaataattgccaggaagtataatgtttccctgcagcaactcatggagcttaatcatttcaaatcagatcaaatatatgctggacaaatcattaagattagagagaaactgtttagaaatattaataacaaatttttctaaaggagagtaatatgaatgaaggagagaataccaaaaaaggaaatagagcgaataaagtaaaaagaacgcctcgttatatggaatttcccgtgacatacgaagtatataatgtggaatccggcgatacattatggacgattgccaaatcctttaaaattccggtacaacaacttatgaatcttaataagctttcttcagatagaatttatcctggacaaattataaagataagagaaagataatctttgaggtttcggaaacgaatcaaattgaaatgacaatccttatttttttatttgtggggaacttgatatttttggggatgaaggggttatgagatgtttcaaatgagctatttctattctggattaggatgggattttattcaacacgttgatcaaacgaacggagtattaaatgttgtgtctcctgattttttctatatcagaaaagatggatcattacttctccgttcagctaatcccgatgtgattaaagctcttcatagaagaaaattaaaagtagttccttttctaagcaatcattgggatcaggatttgggacgatttgcattaatgaaccgagttcgtttagctaaacaaatttctcatgcaatagaagaactggatttggacggaattaatatcgatatagaaaaccttacagaaaaagatcggaatctatttacagattttattagattagtaaggaaaagtattcctaaacataaagaagtatcagttgcagtggcggcaaatccttttggctggacgaagggctggcacggatcatatgattacgagtatttagctaaatatgcagattatcttatggttatggcctatgatgaaagccgccttgctgggcctaccgcaagtgtaggatgggtggaaaagtccattcaatatgttctgacccaaaaaatctctcctcaaaaactagttttaggattgccattctatggccgctgctggatggaaggccaatctgcctctcaagccattcccctttaccttgttgactccttagtaaaaaggcatagcgggacaattatttttgacaccaagagtcaatctccaaaagctatttttactgtcaatcacgataacaaggggccgttgccttcgggaacatatacattatggtttgaaaatgaacagtcactcagagcaaaaataaaactcgctcaaaaatataatctgaaaggtcttggcagctggagtcttggacaagaagatgtgtcagtctggaatacagtgtttaaaaatatataatgatttatagttcagaacaaaattcgaagataattgcaatgaatctctaaatggacatactgaaaggagtttattacgagtgcgggtaaaacagtgagggcattccataggcccttctcccgaaatgttctatacgaggcattacattgggcttgaaatacacattcaaacttatgttatagtacgcatttcaagtaattacggatgtgttgaatttattctgcttccatgatttaagtcatacacatgctacttgatagcaggattattgcatttcattcagaattgttcaggatcgatatggaagcgcacgaataactagaactttaaaagcatacactcatatacttcctgaatggatgctggtttatctaaaaaacatgatgagaattgattgaccgctctcattaaaggatggagaaattcaaggcgccaaggtacgcatggtgaaacatgacttgttgataatcgaccatatagtttctccttagaaatgagggggtttttacataaaaaagacgagcgaatccggggggaattccactcgccgctttctaatgaaaagacgggatgctggatggcagctcgtctgttttattataatttaacgaacgtatgtttgtaaaggtgtcttttcgaatgaattggttcatataaccgttaagaacagattcattgtaaacattcgctaaggtatgctaagatgcatggactataaaggagtgatatgaagtgaagacattgcggttaaacaatgtaacgttagaaatggctgcatatcaagaggagagcgagccgaagcgaaaaattgcatttaccttaaacgttacgagtgagacttaccatgatatcgctgtcctgttgtatgaaaaaacgtttaatgtcgaggttccggaacgcgatcttgccttccggggggaaatgacaaattattcaacatcattgaccaacctgtacgaaccaggggccgtcagcgagttctatatagaaataacagaaatagacaaaaacgccgattcatgatcggtgttttttatgtaaaaaagctgccggccggcagcttttgagaaagcgaatttcatatgtaaggtgttaaattgtccgtcttgcagttttttgaataaatgtggaaataaggaggttttaataggagtctctgatgatcttataatttttatgattaacaactgtcaatgaatctaactcaagatcccgatagttatccatgatcgtcacatcaacgataacagaattctcatttactttttcaacaacaccggttaatccgtttttaaattcaatgacattcccaaccttagcgattttcacaagcttcctctcctttaaacataataatgccttttgaaagtattttgcagtattttcattgagaagtaaagcgataaggagttttatctcccttatgaattgtcctgtcgctataaagatgatatattgattttcgtcaatagaaagaaaaggggggaatttttgttgcgtcccgaagaaataacagaaatgattgaacagctgcgcaccggcgccataaacgaactgagagtccagaaagagcattttcttgatttcagggccgtgttatctaaacaagatgattttaaacatttccgaggaattgcccagcaaggcggagatgttatctttcaatacttagaacagccaagaagctgaaggtttctcatacgtgagaagcctttttatcatatatgacagaacacaagccttttattacagctgtctgtaacaggtgtaataaaatgtaaagtgtcaaaaatggataaacatgttttaatttgacaatatttatagaatttcaaactgtttttttgccattaagcagtgagtcatcctctttattccatcctgatacctccttgggagagttggaaaatctttttccgtgaaaatgaatggatctcttgttaaggttatgaagtgttttttggagcactttaaggaggaaactgtatgacaacgaaattcactgctctggctgtttttcttctttgtttcatgcctgcagccaaaattgagcatacacaagcttcactactgagcgcaaagaagacaaaacatgaagaagcgaaatggcttacacatatagatcgaaatacgaatgaatctttcccttcactgtctgctgataaagacaagaaaataaaaccgattaagctatcagcacacactgaaaagaaagagaaagataaaccggacaaaacaaatgatgagaaagaaacatatacacagtctgaaaaagagttgctgtcacgtctcgttcacgcagaggccaaaggagaatcatataaaggcaaggtcgctgtagcaagcgttgtactgaacagaacggagaaaaaaggttttcctgatacgataagaggagttatttatcagaaaaacgcctttgaaccggtcgcaaacgggagcattaaccaaaagcctgataaagaatcgattgaagctgccgaagaagcgctgtcctcaaaaaatagagaaacagatgccatattcttttataatccgaaaacagcgtcagataattggattcgttcaagaaaaatcgtagaaaaaatcggcagacacgtttttgccgtctaagcatagaagagacaatttgtctcagctgtgcttttttcatataaagagtaaaaataaaataatttttgaacttgtctcatatgatgttggtagtacaagagacaaggagagacatcatgaatcgatttgtgaaagggatcattcttttatccattgccgcctttttcgctgaatgccttgaatttgtcgtcaatatgattttggcgcgggagcttggcgagcatgggatggggctttacatgagtattttgcccacgatctttttaattattgtcatcgcgagcctggaactgccgatatccatttctaaattcattgccgagtcaaatcctaagcttcatgaaagcatgctgaggcacgctttcagaatgacagccatttttactgctttttctactgtcgccgctagtattgcgcttccgtttataccggtatttgatacataccacccgtttattaaagggattgtcatcggcttaattcctgttgtcgcctttacttcaatcgccaggggctactttatgggtgtgcagaaaatggggaagatcgcaattgccaatgtgctgaaaaaaatcatccagctcttgtgcttattcctcttttttcaatggtactcatttgaattggacatggctgtgctgatttccttgtttgttctagtcgtgagtgatgtggtcgtgcttgtttatttatattcacaatttatcatggcaaggcgggcgttatccggccagcagcacattcatttgcgcggaaaggatgtaaggaaaagactgcttgctgtttcaattcctacaacaggactgcgtatttttcatgcggttgtcaatgcaattgaaccctttttagtaaaaggagctcttttggctgcgggcgttgccgggacagcggcgatcgatcaatacggaatgctggcaggagtggctgtgacgatagggtcgttccctgcttttattgcccattcgttaatggtcgtcatgataccgagtatttcggaagcttatgcactttctcagtatgacatcgtgttaaaaaggctgaagcagtcgattttcattacattaggttacggtatacctgccgtctgggtcatgttccagtttgcgggacctctcacgcatttgttttttcactctcctgaagcgcagtattatttgcagctgttgtggccttactttctctttcatctgtttgtcatgccgctgcaggcgtgcttaatcgggatgggttttgtgaaagaggctttttatcacaatgtatggagtcatatcgttgcgctaagtatgatgtatgtactgggatcaatggagaatctgcaaatgctcgggattatccttggaatgaacactggcatgattcttttgacgagcctgcactatgccacgatctgcaaagcattgaaggtatccgtattccttacgggagggaccagaacgccgcgaattgaaggatgatataggaactgcaggggcaagctaattgaaaagcatgaaaggaagattccatgttgacgaagcgcttgcttactatatacattatgttattagggttgattgcatggtttccatgtgcggcacaagctgaggaaaaacagcctgctgttcccgctgtttttcttatgaaaacgatagaaggggaggacatctcgattccgaataaagggcaaaaaacaattctccatttttggacgtcatggtgtccgccctgcaaaaaggagcttccccagtttcaatcgttttatgatgcccatccatccgacagtgtaaagctggtaacggtgaatttagtgaattcggaacaaaatcaacaagtcgttgaagattttattaaagcaaacaagctgacgttcccgattgttcttgactcaaaaggggaattgatgaaggagtatcatatcattacgatcccaacatcatttttgctgaatgaaaagggagaaattgaaaaaacaaaaattggcccgatgacagcggaacaactgaaggaatggacggaagaatagctgagagcatagactctcagcttttttcatatagagaagaagcgaataaacattaatgataattattatcaaaaagaaattaaaataattataattgaaattctcttcgtgcgtgctataataaaggaagacatcaagaaataactgacgataaagctgccttttgggcagcgattttgtttttataagagaaatgaagatgatttacgttctcaattagagaggagaattcgatatgaatgaacaagttatcgttcaacgcgacccgcatgagccattgaaaacagacaagagggaaaaaaactgggcacagcacgcggagcttattgcagcacttgtatcaggcgctcttattttggcaggctggctcttatccggatatcaggtattatccataatacttttcttgctggcttttgtgatcggcggatttgctaaagcgaaggaaggaatcgaagaaacactcgaagccaaaacgctgaatgtagaacttttaatgattttcgctgccgttggttccgccttgatcggatactgggcagagggtgctattttaatatttattttttccttaagcggagctttagaaacatacacgatgaataaaagcagcagagatttaacgtctttaatgcagcttgagcctgaagaagcgacattgatggtcaatggtgaaaccaaaagagttccggtttcagacttgcaggccggtgatatgattgtgatcaaacctggagaacgcgtagcggcagacggtatcattgaatcgggctcgacaagtcttgacgagtcggctttaacaggtgaatcaatgcctgtagaaaaaaacacaggcgacactgtattcacaggaacggtgaatcgcaatggctccttgactgtccgtgtcacgaaagcaaatgaagattcgttattcagaaaaattatcaaactggttgaatcagcgcaaaatagtgtttcacccgctcaggcttttatcgaacgatttgaaaatgcttatgtgaaaggtgtgctaattgcggtggcgctccttttattcgtcccgcactttgcgctgggctggagctggagtgaaaccttctaccgcgcaatggtgtttatggttgtcgcgtcaccttgtgcgcttgtcgcctctattatgccagcggcgctgtccctgatttcaaatggcgcccgcaacggtatgcttgtgaaaggaagcgtctttcttgaacagctgggctcagtgcaaatgatcgcctttgataaaaccggcactgtaacaaaaggccagcctgccgtagagacgatcagaatagcagaaggattcagtgaagcggaagttcttgaggctgtctatgccatcgaaacgcaatcaagccatccgctcgcccaagccataacggcgtacgctgacagccgtggcgtgaatcagtccggctacatatctatagaagaaacctcagggtttggcgttatggcagaagtgtcgggtgcgatatggaaggtcggtaaagcaggttttatcggcgaggaaatggcagcacaatttttgaaacaaacagcatccgatgtcattcaaagcggtcatacaattgtatttgtgaaaaaggatgatcaaatagtatgctgtatcgcactgaaggaccaaatcaggcctgaagcaaaagaggtcatggaagaactgaaccgacttgggattaaaacggccatgctgacaggagatcacgaagacacggctcaagcgattgccaaggaagccggcatgacaactgtcgtagcagaatgcctgcctgaccaaaaagtgaatgaaatcaaacggttaaaagaagaattcggaacgattgcaatggtgggtgacggaatcaatgatgcgccggcactcaaagcggcggatgtcggcattgcgatgggcggcggaacagatgtagcacttgagaccgctgatatggtcctcatgaaaaacgatttgaaaaagctcgtaaacatgtgccgcttgtctcggaaaatgaacaggatcatcaaacaaaatatcgtgttttctctagctgtaatctgcctgctgatttgtgcaaactttttgcaggcgatggaattgccatttggcgtgattggtcatgagggcagcacgattttagtcatactaaacggtttaagactcctaaaataaagccagcagcctaatcaggctgctggctttttatgtatcaagctttcccttcatttttgtctttatcagatcttttcataaccaggatgagagcgaggatgcagcaaaggaaacccgctgcacagcctatgatagagctgtaataataaaagcccaccatcttcatcccgataaaaggagcggaaattcccaaaaccgttaagagcataactgcttttcgtctgaaaaaattcatcagcaaacggaacaaccccctgcgattgaacgttactgtcagtatacaggaagaggagcaggaaataaaatgcattagaaaatgaaggcgtcgtgaaaggcaaacaccggtaaaacctgttacaatggaagacagaacaatgcattgcaaatggcagggaggaacaagaagtgaatagaatacaacgcgtctcttcatggctgaaggaagcggggcatactgccgcatttattcatacaaaagaaaatgttttttacttaaccggtttttacacagagccgcatgaaagattaatggggttatttatttttcaagaagaggagcctttctttgtttgtccaggaatggaagcaggacaggcccgcaacgcaggctggaatcatgaaatcattggctatgcggatcacgaaaatccatgggagctgatagagaaggccttgaaaaagcgaaatatcagcatacatacgcttgcggtagaaaaggattcaatctcgctatcacgtgcagaacagctgaagcatgcgacgggcggggctcaatttgtttcagcagaagaaacactcaatcaatttcgcctgattaaagaagacaatgagattcgtttgctgaaagaggcggcaaagcttgcggattacggtgttgaagtcggcacagccgctttgcgtgaaggcatcagtgaagtggaagtgctcgctcaaattgagtatgagctgaagaaaaaaggaattcagggcatgtctttctctacaatggttttattcggagaaaaatcaggccagcctcatggaaatcctggtacagccacgttgaagaaaggtgattttgttttatttgatctcggtgttattcttgacggctattgctctgatattacaagaacgtttgcatacaaaaccatcaatccgaagcaggaggccatttacgagactgtgcttcaagcggaaaaagccgcgattgaggcaagcaaacccggtgtgagaatcggagatctggatttaacagcccgtggaatcattgaaaaagcgggatacggtgactattttcctcaccggcttgggcatggactcggaatttctgtccatgagtatccatccatgagccaggccaacgatacactgttgcaggaaggcatggtctacacgatcgaaccggggatttatgtgcctgagatcggcggcgtgcgcattgaggatgacgttcacgtaacaaaggacggagcagttgctctgacccaatatccaaaggaattaatcatactgccgtaatagaaataaaaaaggactttgttctcgacatcgtccttttttatctgcattaaataaaaaaatcatcaaatgttcgaaagggtttaatttcatgtttttggttgagaggttttacagcaagacagctgccaccgagaacagtgagacataacccaattaaaatgaagaaacccatgtgatcttctcctttcagcttaaaacacaaaaagatatctggtacgtccatatcatattgtatgaaacgcattccagatcaaggggatttagaaagaagggaatctatggctaatattaaagacattgcagaaaaagccggtgtctctgttacaacggtttcccgagtcataaacaatcatccatacgtcagtgaagacaaacgaaaaagagtgtttgaggcaatggaatcattggagtacacgagaaatattcacgctgtacatttgtcgaaaggattttcaaacatgattggtgttgtcttgccaacggttaatctgccatattttgcagagctgattgcaggaatagccgacgcagccgcggaatccggggttcacctctctttattccaaacaaactatgaggtacaaaaagaaatctttgcgctgtcccaattaaagcagcgccaggttgacggcctgattttttgctcaaaggcgcttgctgatgagaaactcatggaatgggagggcccgattttgctttgccagaattcagataatgcccgcttcccaaccatcagcattcctcaccaagaagcatttcggaacggcttggactatttaattgccaaagggcacaaaaaaatagccatctgtttggcaagaaaaaaaggcatgaacagccattttcgaatcaaagcctacaaagaggcattggaagagatcggcgaggcatttcgtgaagactgggtaattgagaaagcgattacaattaatgatgggaaggcgctttttcataaatggaaaacgtggaaggaaaagccgacggctatttttgttgccaatgaccaagtctcagcagggctttttcttgaagcaaagaaccagcgggtgtcagtaccggatgagcttgcaatcttaagcgttgataaccacgaaatcagccaagcgcttggaatcacaacgatcgatattcagacaagggaaatgggaaagcaggcatttgccatactggaaaaaagaattcaaggacagccaattgaaaggaaagttctggattaccgtctcatcgaaagatcgactgtttagtgaatgcattgaaaaaaggtttgacgtgcattccgttcgttatgtacgatatgaggtattgaatgacaaaggagctgaggatcgtgaatgggtccttcacagtgaaaaaggtactgaataataacgtattaattgcttctcatcataaatacagcgaagtcgttttaatcggaaaaggtattggtttcggaaaaaaacaagatgatgtcattgaagataaaggctacgataaaatgttcattttaaaagacgagaaggaacaaaagcaatttaaaaagctccttgactatgttgatgaaaagctcgttgatatttcaaacgatgtcatctatcacataagaaataggactaatcactcattaaatgaacatattcacattgcgttgacagaccatatcgcatttgcgatcaaaaggcagcagcagggatttgatatgaaaaatccatttctaatggagactcagtcactatatcctgaggagtaccaaattgccaaagaagtcatagatatgatcaatgaaaaagcgggaatctgccttccggaaggggagattggttttatcgctctgcatatccattcagcattgacaaaccgtccgctgtccgaggtcaatcagcactctcagctcatggcgcagcttgtcgaggtgattgaagactcatttcaaatgaaagtaaataaggaaagtgtcaactatttgcggctgatcaggcatatcagatttacaatagaaagaattaaaaaagaagaaccgactaaagaaccagaaaaattaatgttgttattgaaaaatgaatatccgctatgctacaatacagcttggaaattgattaaaatcttgcagcaaacattgaagaaaccagttcatgaggcggaagcggtttatctgacgcttcatctgtaccgattaaccaataaaatttcataaattcagtttatccttataacgtgttactgattcgatcaggcatgagtgattgagggaaaaaaacgggaagttcattctcgttcttttgcgcacccaattttgctcatgcctttttgttgtgtaaaagggcaaatgtaaacggttaaactggaagacttacgcctgtgaattcgttgtcatgatttttagctgtaaggtcagactagtaaaaagaggaggtcaattcttatgtttaaagcattattcggcgttcttcaaaaaattgggcgtgcgcttatgcttccagttgcgatccttccggctgcgggtattttgcttgcgatcgggaatgcgatgcaaaataaggacatgattcaggtcctgcatttcttgagcaatgacaatgttcagcttgtagcaggtgtgatggaaagcgctgggcagattgttttcgataaccttccgcttcttttcgcagtaggtgtagccatcgggcttgccaatggtgatggagttgcagggattgcagcaattatcggttatcttgtaatgaatgtatccatgagtgcggttcttcttgcaaacggaaccattccttcggattcagttgaaagagccaagttctttacggaaaaccatcctgcatatgtaaacatgcttggtatacctaccttggcgacaggggtgttcggcggtattatcgtcggtgtgttagctgcattattgtttaacagattttacacaattgaactgccgcaataccttggtttctttgcgggtaaacgtttcgttccaattgttacgtcaatttctgcactgattctgggtcttattatgttagtgatctggcctccgatccagcatggattgaatgccttttcaacaggattagtggaagcgaatccaacccttgctgcatttatcttcggggtgattgaacgttcgcttatcccattcggattgcaccacattttctattcgccgttctggtatgaattcttcagctataagagtgcagcaggagaaatcatccgcggggatcagcgtatctttatggcgcagattaaagacggcgtacagttaacggcaggtacgtttatgacaggtaaatatccatttatgatgttcggtctgcctgctgcggcgcttgccatttatcatgaagcaaaaccgcaaaacaaaaaactcgttgcaggtattatgggttcagcggccttgacatccttcttaacggggatcacagagccattggaattttctttcttattcgttgctccagtcctgtttgcgattcactgtttgtttgcgggactttcattcatggtcatgcagctgttgaatgttaagattggtatgacattctccggtggtttaattgactacttcctattcggtattttaccgaaccggacggcatggtggcttgtcatccctgtcggcttagggttagcggtcatttactacttcggattccgatttgccatccgcaaatttaatctgaaaacacctggacgcgaggatgctgcggaagaaacagcagcacctgggaaaacaggtgaagcaggggatcttccttatgagattctgcaggcaatgggtgaccaggaaaacatcaaacaccttgatgcttgtatcactcgtctgcgtgtgactgtaaacgatcagaaaaaggttgataaagaccgtctgaaacagcttggcgcttccggagtgctggaagtcggcaacaacattcaggctattttcggaccgcgttctgacgggttaaaaacacaaatgcaagacattattgcgggacgcaagcctagacctgaaccgaaaacatctgctcaagaggaagtaggccagcaggttgaggaagtgattgcagaaccgctgcaaaatgaaatcggcgaggaagttttcgtttctccgattaccggggaaattcacccgattacggatgttcctgaccaagtcttctcagggaaaatgatgggtgacggttttgcgattctcccttctgaaggaattgtcgtatcaccggttcgcggaaaaattctaaatgtgttcccgacgaaacatgcgatcggcctgcaatccgacggcggaagagaaattttaatccactttggtattgataccgtcagcctgaagggcgaaggatttacgtctttcgtatcagaaggagaccgtgttgagcctggacaaaaacttcttgaagttgatctggatgcagtcaaaccgaatgtaccatctctcatgacaccgattgtatttacaaaccttgctgaaggagaaacagtcagcattaaagcaagcggttcagtcaacagagaacaagaagatattgtgaagattgaaaaataagggtgttagtacgccgtgcttgtcagatgacaagtacggttgtatgatataatattgtgaagtaataaagctttaagttaaaaggagaatgataaaaatggcacaaaaaacatttaaagtaactgcagattctggaatccatgctcgtcctgcgacagttcttgtacaaactgctagcaaatacgacgctgacgttaatttagaatataacggcaaaacagttaaccttaaatctattatgggtgttatgtctttaggtatcgctaaaggcgctgagatcacaatctctgcttccggagctgacgaaaacgatgctcttaacgctttagaagaaacaatgaaaagcgaaggactcggcgagtaatgcaagaattaaaagggattggtgcttcagccggcatcgcgattgcaaaagcataccggcttgaagagccagatttaacggttgaaaagaaaaacatctctgattctgaagcggaagtaagccgttttgatgaagcgattgcacgttcaaaaaaagagctcgaaaaaatcaaagagcacgctttgaaagaactgggtcaggataaagctgatattttttctgctcaccttttagttctcagtgaccctgagcttctgaaccctgtgaaagaaaaaatcagcactgattcagtgaacgctgaattcgctttaaaagaaacgtcttctatgttcgttaccatgtttgaatctatggacaacgaatatatgaaagagcgtgcggcagatatccgcgatgtaacaaaacgcgtaaccggccacctgcttggcgtcgaaattccaaacccaagcatgatctcagaagaggttattattgtagctgaagacttaacaccgtctgacacagctcaattaaaccgtgagttcgtaaaaggattcactactgatatcggcggacgcacatctcactctgccatcatggcacgttctcttgagattccagcagttgttggaacgaaagcggcgacaggcacgatccaaaacggcgtgactgttatcgttgacggtatcaatggcgatgtcattattgacccatctgcggaaactgtaaaagagtatgaagaaaaacataatgcttatttggctcaaaaagctgagtgggcgaagcttgtcaatgaaccgactgtctcaaaagacggacatcatgtagagcttgcagcgaacatcggtactcctgatgatgtaaaaggtgttcttgaaaacggcggagaagcagttggcctttaccgtacagaattcctttacatgggaagagatcagctgcctacagaagatgagcagtttgatgcttacaaaacggttcttgagcgtatggaaggaaaatcagtcgtcgtgcggacacttgatatcggcggagacaaagagcttccttacctgcagcttcctaaagaaatgaacccgttcctgggatatagagcgattcgtctttgccttgaagagcaagaaatcttcagaacacagcttcgcgcgctgcttcgtgcaagtacatacggaaacttgaaaatcatgttccctatgattgcgacagttaacgaattcaaagaagcaaaagcgatccttcttgaagagaaagaaaagctcgtaaaagcgggacaggctgtatctgacgatattgaagtcggaatgatggttgagattccgtcaactgcagtcatcgctgatcagtttgctaaagaggttgatttcttcagtatcggaacaaacgatttgatccaatacacaatggcagctgaccgtatgaatgaacgtgtatcttacctgtatcagccatacaacccggcaatccttcgcttaattacactcgtaattgaagcagcacacaaagaaggaaaatgggttggcatgtgcggagaaatggcaggagacgagattgcgattccgatccttctcggcttaggcttagatgagttctcaatgagcgcaacgtctatccttccggcaagaacacaaatcagcaaattgtctaaacaagaagctgagtcattcaaagagaaaatcttatctatgagcacgacagaagaagttgtcgcgttcgtaaaagaaaccttcaagtaatgtacaaaaaccagacggcctccggcctgtctggtttttttcataagtaagggcatagaaggacacaataacatggctaggagggatagtatgtcaaaccaatttaacgcaggagatactgtttatgtgatctacagaaatccgcacgctgccaatgtagctcacataaaggaagccgaaattgtgcaccatccataccatgaaggcgagctttccctgtttatttatgaaacctatcatccgttcgcagaggacgatgctgtgtttgcaagctatgaagaagctaaatcgctttacaaagaactgtttgatattgatccgtatgagtaacaaggaaatcattacaactcatatcctttccgcctagtgagaaaagtaacgttagtaaaggaaaaggatgtggcatcatgcagaacccatttgttccgcagcttgtgtatatagaaccgagggcgctggaatatccgctgggccaagaattacaagataaatttgagaatatgggtattgaaatcagagaaacgacatcccacaatcaggtgcgtaatatccctgggaaaaatcatcttcagcaatatcgcaatgcgaaatcaactttagttatcggtgtccggaaaacattaaagtttgattcatccaaaccctcggccgaatatgccattccgtttgcaacaggctgcatggggcattgtcattactgctacctgcaaacaaccatgggatcaaagccgtatatcagaacttatgtaaacgtcgaagagattttagatcaggcagataagtatatgaaggagcgcgcaccagagttcacaaggttcgaagcatcatgtacgtcagacattgtaggaattgatcatctgacacacacgctgaagcgcgccattgaacattttggccaaagtgatctcggaaagctccgatttgtaacgaaatttcatcatgtcgatcacctattagacgcaaagcataacgggaaaacgagattcagattcagtattaatgccgactatgtgattaaaaactttgagccgggaacttcacctcttgataagcggatagaagcggcagtaaaagttgcaaaagcaggctacccgctaggctttattgttgctccgatttatattcatgaaggctgggaagaaggatacagacatctgtttgaaaagctagatgctgctttgccgcaggacgttagacatgacattacgtttgaattaattcaacaccgttttacaaaaccggccaaacgagtgatagagaaaaattatccgaagacgaagctcgaattagatgaagaaaagcgccgttataaatggggccgttacgggatcggaaaatatatttatcagaaagatgaagagcatgcacttcgagaggcacttgaatcctatattgatacctttttccctaacgcaaaaattgaatatttcacttaaacgggctgttgtgatcaacagctcgcttttttataaaaaggatttttccattccatcaaaacgccgtaattcaatgattctttatcctccaaataattgctgactacacgaataggtgaacgcccgcaacggaggagaaaggacagcacagggtcgtttttcctgccttccatcacatcttcaacgtactgaacagcgctgatctcgtgtgcgtatttataatacaaaggaatgcggccgccgccgagaaggcgttccagtcttttatcaacagtcagctcatacatcgtattcatcagccattttccgattccaagctttcgataatgaggagaaacagaaatatccactacatataaagtatttccatgaggttcatgatttttaatcgatccgttgtcagttgcttgtgcccatgtatgatcaggagattcaggctcaaattgtacaataagagcagtcatggaaccgataattctgtcattgatgagcgcgcataaagcgccttccggaaaggttttgatatggctggcaagctggtcctctgaccacagcaattcctggggaaacggaggagggaaacattcttcttgaagagaaatcagcctctcgatgtcagtctcagtgtagtttctaatggtcagagcctcaaattttctgccgtcatgcacatacatttgttttagtatgatcatcactctccttatgttgtttcattataacgaagattgaattttcagtaaatatattccgattttcttataatttattttttgattattcatttttcaaacgaaagggccgatatagaaattaggaggggattggtttgtttaaaaaacttcacatgaagattgctgtttttgtttcgattatgttaatcatcacagttgttcttttaatgctgtcttcttatttgacgctaaaaccgatgattacagaggatgggaaaaatacaactcaaaacgtgacgcagtcacttgaacaaaatattgaattgcaattaaagagttatgccatttcgttatcaagattggctaatggggaattaacgcatacatttgtaacgaaaccaagtaaagaagcttctcggctgtttcacgatgacattaagcaaatcaaagataacgatgattatgttgcgatggcttacataggcaccgcaaaaaaagaaatgtttacatatccaaaagcggatttcgctgaggattacgatccaacatcaagaccatggtataagcttgcagctgaaaccccggatcaagttgtttggacggaaccttataaagatgtcgtgacaggagacatgattgttactgcatcgaaagcgatcttagacgggcaaaaagtgataggggttgccagctatgacttgaaactctctgctatccagagtatggtcaataaacaaaaggtgccttacaatggatttgcctttttagctgatgcgagcggcaatcttttagcccatccgtcaaatcaaggaaaaaatatatcaaaggatcaaacactgcaaaccatcgcatccgagaaaaaagggatacaagatgtgaatgggaaaatggttgtgtaccaaacgattggcgaaacgggctggaaggtcggaacgcagtttgataccgatcaattaatgtggatttcagataaaatgaatcgggcaaatctttggatatcattgattgcgcttatcataacaattattctcagctacttcctggccaaaacgataaccggcccgatacagcagctgatcgcaaaaacgaaagctgtttccgcaggcgatttaacagtgcgcgcggaatcaaaatccaaggatgaagtcggtattttaacaagagactttaatctgatggttgaaaatatgaaggaaatggttgagcaagtcagactctcttcagggaaagtatctgacacctctgaacaattaacggctgtctctgccgaaacaaatgaaacaagcggacaaattgcaaaagcgattgaagaagtagccgcaggggcatcggaacaggcttctgaagttgaaaccattaatgaaaaatcggaaagcctgtcaacgaaaatcaggcaaatcgctgaggaggcaggcggaattaaagaacgatcaaaatcgtccgaggatgcaagctataaaggacttgacgcgctcggccagctgctgatgaaatcaaacgaagccaatatggaaacgaaaaaggttgaaacgatgctgctggatttggaaaatcaaactaagaatattgaagaagtcgttacagcgatttcaaacatatctgatcaaaccaacttgcttgccttaaatgccagtattgaggcagccagagccggagaaagcgggcgcggttttgccgtcgtagccgatgaagtgcggaagttagctgagcaatcagccctttctacaaagcatatcagcgagactgtgaagcttatccagcttgagacaaaagaggcctctcacgcgatggttgaggcaagcagaatgaatgatgaacaaaacagtgccattcacgaaactggagaggtattaaatacgataactgcagaaatgcagtcactggtacaaggtattgatcacatttacgcggaaattcaaagaatgagtgaagaacagcttgcgatatctgaagctattcaaagcatttcagccatatcacaggaatcagctgccgcagcagaggaagtgaacgcatcaaccgatgaacagcttgtcacccttgagaaagtcaaacactcaacggaaacactaaaacatgcaagccaagagcttatgaacacaattgcaaaattcacattgtaatccaattacatccccaaacatcatttgttttggggattttttattttataagatgaatagatatggtagtctagaaaatgaaggaaaaatgataaattttaactaaaatctaaacgaaacatctgggaggaatgaccttgaaaaaaacaattggttttatcggtcttggagtaatgggaaaaagcatggcatcacatattctcaatgacggccaccctgttttggtgtacacccggacaaaagaaaaagcagaaagcatacttcaaaaaggcgcgatctggaaagatacggtcaaagatctttcgaaagaagcggatgttatcatcacaatggtcggctatcccagtgatgttgaagaagtgtatttcggaagcaatggaattattgaaaacgcaaaagaaggcgcatatcttattgatatgacgacatctaagccttcgcttgcgaagaagattgctgaagcggccaaagaaaaagcattgttcgctttagacgctcctgtttccggtggagacgtcggtgcacaaaacggaacactcgcaattatggtcggtggagaaaaagaagcttttgaagcctgcatgccgattttctctttaatgggagagaatattcagtatcaaggaccggctggaagcggacagcataccaagatgtgcaatcagattgcaattgcagccggtatgatcggtgttgctgaagcgatggcttatgcccaaaaatcaggcctagagccggaaaatgttctgaaaagcatcacaacgggcgcagccggaagctggtcattgtcaaatcttgctccccgtatgctgcaaggcaactttgaaccgggattttatgtgaagcattttattaaggatatgggaatcgcactagaggaagcagaattaatgggggaagaaatgccaggcttgtcgctcgcaaaatccttatatgacaagctagctgctcaaggtgaagaaaacagcggaacacagagtatctataagctttgggtgaaataaaaaaagattgcctgtacgaaacaggcaatcttttttttattattttccgatgaattgttgtgtccagatgcttccagactcaacgtagccaacaccgatgtgagtaaagttagggtttagaatgttttttctgtgtccttcactgttcatccaagcttttactacttcttctggtgtcttttggcccttcgcaatgttttcacctgctgttttgtagctgattccgaaagatttcatcatatcaaacggtgagccgtatgttgggctttggtgatcaaagtagtttttgtctttcatatcctgagattttgcgcgtgcggatttgcttaacgtttcatcaatttgaagcggctttaatccttgtttttgtctttctgcatttgtaagttcaacaacttttttctcatatgcacttacagatgaaggtgcagatgttgttgtgtttgttttttcagcagttgcaggtgctttagaagcagtgttttgatcagcagctgctttttcagtagtcttttgtgcaggttttgccgtttctgtcttttgaacatcctgaactttcacgttagattgcttcgcatgtttttgaagaagctgcttcatctctttttcgtttgcagcgtttaacgttttgatatttgtgttaatatgcagctttttcactgcatcgttaagtgacatgttttgtactgtgttccccgtttttactgtaaccacaggctggcaggagagttctttcgctgatgcttgctgtacgcccccgaatgtgaataatccaaccgcagcggcagcagataaaataaatgctttcttcattagttcgtaacctcctagagttgtttgtttctacagaaaaatcataacatagcttttttgtcataaagattccagcactttcctttgacaaatagagattgtcattttcgtaaagtaaatccgttgaatcactaagaataagggaatcagcggtatatatgattttatcgtaccgttacatagcttccttttttttgaaccgttagttatattttaatgtgtttttatattgacagcttttttttactccttttcgctgtaacaactattacaaaggtgttacaattaatctcagtatatgtaaatatattgaacgatttgagaggggtaaccagaagtgactgaaataggacgtgaaccaaagaaaaagagcaaaggaaacagagcaatcagaatgaacctttttttcctagctgtctttgttctattcactgcattaatttttaagctcggggttgttcaaattgttgaaggcgaacagcatgaagaagacgctgagaaatcaaatgcaaaaacagcttactatcctgcgcctcgcgggaagatgtacgacagaaaccagaaagttgctgtcgacaaccagagcgttccagaaattgtgtatgtatcaacatctagcacaaaaacagaagataaaatcaaaacagcgaagcggcttgcttctttcattcatattgataccgaatttttgaaggaaagggatctttgtgattactggatcgcagctcatccgaaaaaagccgccgctctgcttaaggaatcagaaagcaatctgaaaggagaccaagcttacaagcttcaaatagagcgtgttccggatcaagaattaaaggctattcagcaagatgacgaagaaatggaaactgctgcgatatatacaaggttttcaagcggaaatgcttacgaacctcaaatcgtaaaggcaatgaatccaaataagagcaatagcaatggaaaaaacggagcgctgcttgatgagaagaaaaactcctcgcaaagaccaaaaaatgacttaacatatgatgaaatttccattgtttctgagcatttagaagaacttccgggaatcgatatcgtaaacgattggacacgaaaatatccttatgacaaaaccctttattctgttttcgggggcgtcacgacacctgatcagggcctgctgagcgaccggaaagatttctacttaacaagaggctatgcgaataatgacagggtgggaaaaagttatttagagtatcaatatgaagaatatttaaattcgcataaagaaaaagtggaatacgtagaagataataaaggaaatgtcgtcagccaaaaaaccattgataagggcagcaggggatacgatcttcagctttcttttgacatggagcttcaggcaaaggtagaaaagattattgaagaagaagtaagaaacagccgtgcacgcggaaattacatgcttgacagagcctttgccgtaatgatggacccgaataacggcgatattttatcaatggcagggaaaaagatagatttaaaaaccaacaaaattgaagattatgcgataggggcatttaccacccaatatgaaatgggatcagcagtaaagggggccaccgtgctagccggctatcaggacgggatcccgcattataaatattttgttgacatgccactgtattttgcaggaaacggtaataagcctaagaagtcctatatgaatatgggaactattaatgaattaacggcattgcaaaaaagctcaaacgtatacatgtttaatgtcgccatgcacattgccggtgtcacatacaagccgcatggacctcttcctgctgaccagaaggatttaaacaaaatgagaaattactacagccaatttggcctgggagtaaagacaggcatcgatctgccgcaggaatcagccggtatgcaaactacacctgatgcggtaggggggttaattttagacttggccattggacaatacgatacatatacaccgcttcaaatggctcagtacatctcatcaattgccaatggggggtaccgcattcagccaagaattgttacaagtgttcatgagcccagcaaaaaagaaggccttgggaagaccattgaacaaagaaagccaaacattctcaacaaaattaacaactcagaaagtgacattcagcaggtgaagactggaatgaagctagttaccacttcgggaacagctagaaatacgtttgcagaggatgtttccggaaaaacaggaactgctcaaacattttattacggaacaaatcgtaattggtggggaaaaagcacgtacaatctaacatttgtcggctattatccgtcaaaaaatccaaaagtggctttcagtgttgttgttccttctgtagcgaacgaccacgacccgatcaacaaactcattgccaaaagagctatccacgcctacgcagagctcgaaaaaaaacacagtaaaaaataaaaaacagggtgcacaactaaaagattgtgtgccctttcttttattcaaaaattgacgttcaccataagaatagaaggagaatactcattttctagcgaatcatactaggtaaaagtcaatctgtatatgtcgaaacacgatgatcatgcaaaggagggattctgtggaacaggatacgcagcatgttaaaccacttcaaacaaaaaccgatattcatgcagtcttggcctctaatggacgcatcatttatatatctgccaactccaaactgcatttgggctatctccaaggagagatgatcggatcattcctcaaaacgtttctgcatgaggaagaccaatttttggttgaaagctatttttataatgaacatcatctgatgccgtgcacctttcgttttattaaaaaagatcatacgattgtgtgggtggaggctgcggtagaaattgttacgacaagagctgagcggacagaacgggaaatcattttgaaaatgaaggttcttgaagaagaaacaggccatcaatccctaaactgcgaaaaacatgaaatcgaacctgcaagcccggaatcgactacatatataacggatgattatgaacggttggttgaaaatctcccgagtccgctatgcatcagtgtcaaaggcaagatcgtctatgtaaacagcgcgatgctctcaatgctgggagcaaaaagcaaggatgctattattggtaaatggtcctatgaatttattgaagaagaatatcatgatatcgtgaaaaacaggattatacgaatgcaaaaaggaatggaagtcggaatgattgaacagacgtggaaaaggcttgatggcacacctgttcatttagaagtgaaagcatccccgaccgtctacaaaaaccagcaagctgagctgctgctgctgatcgatatctcttcaaggaaaaaattccaaaccatcctgcaaaaaagccgtgaacgatatcagctgctgattcaaaattccattgataccattgcggtgattcacaatggaaaatgggtatttatgaatgagtctggaatttccctgtttgaagcggctacatatgaggatttaattggcaaaaacatatacgatcagctgcatccttgcgatcacgaggatgtaaaagagagaatccaaaacattgccgagcaaaaaacagaatctgaaattgtcaagcaatcctggttcacctttcagaacagggtcatctatacggagatggtctgcattccaacgaccttttttggtgaagcggccgtccaggtcattcttcgggacatctcagagagaaaacaaacagaagaattgatgctgaaatcggaaaaattatcaatcgcagggcagctcgcggcgggaatcgcccatgagatccgcaaccctcttacagcgatcaaaggatttttacagctgatgaaaccgacaatggaaggcaacgaacattactttgatattgtgttttctgaactcagccgtatcgaattaatactcagtgaactgctcatgctggcgaaacctcagcaaaatgctgtcaaagaatatttgaacttgaaaaaattaattggtgaggtttcagccctgttagaaacgcaggcgaatttaaatggcatttttatcagaacaagttatgaaaaagacagcatttatataaacggggatcaaaaccaattaaagcaggtattcattaatttaatcaaaaatgcagttgaatcaatgcctgatgggggaacagtagacattatcataaccgaagatgagcattctgttcatgttactgtcaaagacgaaggggaaggtatacctgaaaaggtactaaaccggattggagagccatttttaacaacaaaagaaaaaggtacggggcttggattaatggtgacatttaatatcattgaaaaccatcagggagttatacatgtggacagccatcctgaaaaaggcacagcgtttaaaatttcatttccaaaaaaataaaacaacggcttaaacgccgttgtttatcgtctgcattgcttcacgtttttttaatacaaataattctaaacggttcaggccttctctcagcgtgtccagcgagtacgcaaaagacaatcttacatatccttcaccatatgttgagaacgagctgcccggcacgagtgccacaccagcgtcttccaaaagagccatactaaaatcaaatgaagtcattccaaatgatttaatagaagggaagatataaaacgcaccggacggtttaactacgtcaagtcccatagaaacaagacggtcataaacatagtcgagacgttttttgtattgttctctcataattagtgcatcgtcaaagccgtttgtgacagcttcaagcgcggctttttgagaaatggatgaggcacatgacacattgtattgatgaacctttaaaatgtgctttgcaatgtctttcggtgcgaataaaaatccaattctccaaccggtcatgctgtgtgattttgacaacccgttaatgacaatcgtttgatcccgcaaataggttgcgatggagtaatgcggtctgtcatatgttaattcactgtatatttcatcagacaatacgaagacatttctgccttttaagagagctgcgatgcttttcagttcttcttcagataaagtcacgccggtaggatttgacggataaggaagcacgacacacttggtgttggatgtcagagcatcttcaatcagccgggcggtaagcttaaagccgtgtgacgtagtatcaacaatgacaggcttggccccgcacaaattgataataggttcatagcctggataaataggtcctggcataatgacttcatcaccgggagataaaatcgtccggaatgcagcatcaagggcttggcttgcgcctgttgtgatgataatttctgattcagcatcatagttgaaatccgcttttttcttcatataaagctgaacagcttgtctcagctccaggtagccggcattcggagtatatgacgtcacgttttcatcaatggctttttttgcggcagctttcacatgatgcggtgtgaaaaaatcaggctggccgattgtaagtgaaatgacgtcttcgtgttgggctacaagattcgagaatttgcgtattcctgaaatttcgatctctcttgctttcggattcagcaaatgttccataattcatcaccttaacaaatataatgagtttatcctattttaccactagctgatcatttgtcacctttttaactgatatatttcgattgtatgcgccttttttctaaacatacctttcttttcagaaaaaaagaagacaaccagcgatttgattgtctttattgtatcatgttctattattgtttatatgtgccaatttcattaatagccataatcaaaatgaaggtcttcgtgccaaattagatacggaggatgctcttcttgaaggtcagctgattctttcttcatattcaggtaagtttcttcactgatatcctctaaaacagtcatttcgttttctttaaatattactaaggtacccattatttacacccttctttggaaaaatccttgactattttatcactgttagttggaaagtcaatggttattaggaaaaaagtttcttttttgaggaacgcggcttgttgccttcggaattcgattttgaagagctgccattcactttttacaaattacgccgatatatacagtacaatactgaatgcgaatagcgagggattgaattgtcgttacaacaatacgaaattttattggattctggtacaaatgaattagaaattgtgaagtttggcgtgggtgaaaatgctttcggaattaacgtcatgaaggtaagagaaattattcagcctgtcgaggtgacatcagtgcctcactcccatcagcatgtagaaggaatgattaaactcagaggagaaatcctccctgtgatcagtctcttctcattttttggagtagagcctgaaggatcaaaagatgagaaatatatcgtgactgaatttaataaacggaaaattgtttttcatgtcggctgtgtttctcaaattcacagagtatcctgggaagcgattgaaaagccgacatcgttaaatcaaggaatggagcggcaccttaccgggattattaagctcgaagacctgatgatctttttgcctgactatgaaaaaattatttatgacattgaatcagattcaggtgtagacacgtataatatgcataccgagggcttcgatgaaagaagaactgataaaaagcttatcattgtagaggactcaccgcttttgatgcgcctcttgcaggatgaactaaaagaagcagggtacaacaatatcgcttcgtttgaaaatggaaaagaggcatatgaatacattatgaaccttgctgaaaacgaaactgatttatcagaacagattgatatgatcatcactgatattgaaatgccaaaaatggacggacacaggctcacaaagctgctgaaggaaaatccgaaaagctcagatgtgccggttatgattttctcatcgttaattacggatgatctgcgtcaccgcggcgaagttgtaggcgcagatgagcaaatcagcaagcctgagatcagtgatttgattaaaaaagtggatacgtatgttattgaataaataaaaacagccgttgccagaaagaggcacggctgtttttattttaaaagtaactctcgccaagttttttaaagaccggtttatggtaagctggctgctggcgatttggcactagcggcttttctttcatgccgacatattcttgcaataggtgtttcgcttttgttaaagacatttgagctttaggatttcggtacgattgattaagtgtacctaaatgcggaagatgttcgaagtcttctttagttggaggcatgtgaaaatagtagtctccgattgagataagcacgtccgattgctgttggctgaaccttggattttttgaaaaatgaagccctattttctttcctttaccttctttgacaagcttttgcaaagcccgttttttcagcagatataggtatttagggttgggggcggtttttgcatggcggttcacagtgtaaactgcttttgaaagattttctacggttggctgcagatctttcgtatatgcatggtcgtccattatttctctcctttgctcttatcaatttctatatgtttagattatacttttttaaagttgaaatgcaaatattgaatgtaaaaatgcgcttttttctaagaaaaaaagcgcatttttaacctgcattatacagatcttgccttctttttcggctgttcttgaaatgcttcctgaacattcacttccacagcctgagcactgtattttggcagtgcaataaaataaaaaataaaaacgagcaggataataacacccatcccgtaataaagataatcaatgtttgaaacaaacttagggaataacagtgcgactaagccgagtgtcaaagactgtgcaaacatcataaaagggtcctgcatgccgcttacacgtcccatcagttttggatgaacaatttttggcatccaccctccgattgcaatgttgatcggtccgatgcacattcccagtgcaaaagctgccgcgtaatacacccataaaatattggtgtagccgaggacgaagatcagcaaacctgcaatgaaaatcggtatcgacattaaaaagtgcggcttcacttttttagagatgatcgtgccgattacgctgcctgccagcagcccaaacccgagtgcgatcgtaaatacagacgtatgccactcataacggtcaggcgccaatccatatttcattgtaaacatcggcaaaacggcgaatcctccattgacaaatccaaaaatgaagaagccaaaaataagagatgccagcaatttgttttttaaaatatagaggatgccttctctaaagtcatttattgaatccttaacagaagtctttctccagctgaatgcaccgtttggctgtcgggcttcttttggaatccggcagctgcggatcagcagcccggaaatgataaagctgacaaaatcaagaataatggcgccttcaataccgatggtgttgtacataaacgcgcctataccgaccccaaacaccataaaaatgctaaaaagcatctgattaagtcctgccgctttcacataatgctccttcggcagaatggcttgtaccaaactgttttctgccggaaagaaaaactttgttacagcgcttctgataaataagatacaaaaaacaagaggaatattgccggtaaataaagtgaaaaaaagcacgacagtcaggcctgctctgatccaatcacaattttctgccaccttttttctgtcaaaccggtccgcgacgactcccacgatcagaaatacaaatatggtcggaagagaatacatcagctccgccaaggtcgtatatgaaggctggctgctgaatcggtccagcaaaaaaaaagcaaaggccatgttgcctactgtcgtgcccatttgagaagcgagtgctgcgaaaaatagacgaacaaaattacgatttttaaatatatccataaaaacgctccttaccctaaaggtcccactttatcatattataaaccgcctgtttttgaaacaaataagaaaacattaccggttaatcgtgactctcgttccgtttggcacaattgaagcaagttcgatcacgtctttgttatgcatgcgaatgcagcctttagaaacagccttaccaatcgaagcgggattattcgtcccatgtattccgtagtgctgctttgaaaggctcagccaataagcgccaaatgggccgccgggattgcgctggcggttaataatgtaaaactcgccagtaggcgtttgcgttagtattttaccaacggcgatgggataggttttcattacccgattatttaggaacagcgtaagggtcttcgctccgattgagactgcgatatgatacggaattgtataagggtccggcagtccggggatgactatggactgtcctgcggtgagccctgcctgcagtgacggattagcctggagtaatgcagccgtgctgattctgaaatcagccgcgatgctgttcagtgtatcaccttgcttcacctggtacgtaagcagtttcctcatcctccttttttacttataagtattgatggggagcccatcctgctacattaatttgctttttaaggtgaagacagtgatttcaggcttggccagaaaccgcaaaggcagcctggtcatcccgaggcctcggtttacgtaaatatgagtgctgcccgtttgatacattccctctgtgtagacttttccatatggaggcgtaataatcggtccgtaaaaaggcagctgaatctggccgccgtgtgtatggccggaaagctgaaggttcacgggataatctgttgttttcaaggccgcatcaggttcatggacgagaagaatggaaaaaagtctgtcgctcagccttgaaagggtgccttcataatctgggtttcccagcattaagtcatcaagcgaagcaatctcgattttgctgccatctgcgagtgacaatgtttgatagccattgcgatataccgtgaaacctccggccgtcatcaggcttttgtaaacggcagttccatagcctccgtgatcatgattgccgtaaatacaaagcttgccgaagggagcattaagctttctcaataatggaatgactgcctggtggtgctgatacgtatcaggattatcaataatatcacctgtaaaaacaatgagatcaggtttagattcattaattgtaagaatgacagtttttaaatcttcgagagtaaagtaatcactcaagtgtgcatcgctgaactgcacgattttaaaaccgtcaaatccgtgcgggatgagagagctttttattgtgtgttcggttgtctcgatcatatgcggctcgagatacctggcatagccatatcccccgccggccgttaaagccccggcagcaagagcgccgaacattccttttagaaattgtcttctggacatctttttcatttcaaaccaacctttaatagagtttttctattatatcatctgtatctgataaaaatctcatatgagcatgtgctgacagaggcagggatataatgatagaatattattgaatgaatactcattcacaattggagggataaacatggaaaaaaaggcggtaattattaccggcgggtcaagcggaatgggaaaagcgatggcaaaaaaacaggctgaattagggtggcacgttatggtgacagggaggaaccatgaagcacttgaggaaacaaaaaaagaaattgagacctttgaggggcaggtcgcttgttttcaaatggatgtccgttccgattccgccgcttcagacatgataaaagaagcgataaaagcctttggccagcttgacgcgctaattaacaacgcggccggaaactttatttgtccggcagaaaagctgacgcccaatggatggaaagccgttattgagattgttttaaacggcacatttttttgcagccaagcagcggcaaggcattggattgaccagaagcagcagggtgtcattttaaatatggcagccacgtacgcttggggagcgggagcgggggtcgttcattccgctgcagccaaagcgggggtattgtcattgacaagaacgctggccgttgaatgggggagcaaatacggcattcgcacaaacgcgatagcccccggaccgattgaacgaacaggcggtgcggagaagctatttgaatcggaaaaagggatggcccgcacgatgaacagtgtgccgctcggccgattgggcacaccggaggaaatcgccgctttggcagcgtttttgctttctgatgaatcatcctatataaacggggattgtatcacaatggacggagggcaatggctgaatccttatccgttttaaagaatattaatctttggattcaatgtggtataatcagacaaagatagagaagcaggtgataacatgttggatccacttgatattttaacgaacattgatgatgtccttccatattaccaggcgatttttagtgccgaggagcagaaggttgtcggatatgaggtgcttggacgaattttggcagattcagaaatccaaagtctcgggcccttctttttagatgcggggatacccgaagaatataaattagaggttgataacagaattatccgccaggctcttgaccgctttttagagtcggattctgatctgctgatttttatgaatcaggatgccaatctgctgatgctggatcatggtgaaagctttctggagcttctgaaagaatatgaagcgaagggaatcgaactccaccgttttgtgcttgaaattacagagcacaattttgaaggggatattgagcagctctaccatatgcttgcatactatcgtacatacggaattaaaatcgcagttgacaacatcggaaaagaaagcagcaacttggacagaatcgcgctgctctcaccagatctgttaaaaatcgatttgcaggcgctgaaagtgtcacagccgtcaccgtcatatgagcatgtgctgtacagcatatctttattagcaagaaaaatcggtgcggcgctgctgtatgaagacattgaggcgaacttccagcttcagtacgcctggagaaacggaggccgctattttcagggctattacttggtgtctccatctgaaacgtttctagagagagatgtattgaaacaaagacttaaaactgaatttcaccaatttatcacacatgagaaaaagaaactggagaccgtctatgagcactctgaacagttttacaaacgagtgcatcaggctgtgacctctttgagaaaaaacaatctgtcttctgatgatgactttattaaaaagctggcggaagagctgacagattgcagcttcaggatttacatgtgtgatgaagaaggcgatcagctgacgggaaatgtgtttaagcaagatggagaatggatttatcagccggaatatgcggaaaagaactggagttggcgcccttattttctggagaacattatgagaatgagaaatctcagaaaaggttttttcagtgatctgtacagtgatttggaaacaggtgaaatgatcagaacgttttcatatccgatggatgatcagatgtatttatttatagacttgccttattcttatttatatgagcaggacggactgatttaacggctgaaaggccgttttttttatgaaatgaaaaaaatatcaaaaaacgattgacattgatactgagaatcattatcatttaattatagagagaagctactctctgttccccaacccctctatcagatcaagatccgaaaaaacttggcgctacccccgccaagttttttatttgtcaaagcataggacaatccaatgaaacaataaacctaactagtggtaaacgtttaacactgggagaaacattcagtgccgaacacccctgacactgctgcacgggtgaggaggaaaattcgttctgaaatgtttatttcagttccgttgtttgcctctatccagcatgactcccattgattatggccacgcgggacttcaccataacattcaaaagaaggttttgacaaagttgcaaaaaggcattcttaatgctgccaaagattcgaaaaaaattataattgtgtgcatgacattcaaaaaaagcctcaaactaaagaaaaatcgtttttttcactttttttctttgcttaaattcagcagtgaaaatgccatcctgtccgactttatggtatgatgctcaatagaacttgtattataataaatacttgttgatttgaagttgctttttgaaaggagtctttttttagaatgtcacaattaatgggtatcatcacacggctgcaaagtctgcaagaaacagcggaagcggctaacgagccaatgcagcgttatttcgaagtgaatggtgagaaaatatgcagtgttaaatatttcgaaaaaaatcaaacgtttgaactgacggttttccaaaagggtgaaaaacctaacacgtatccgtttgataatatcgacatggtttccatcgaaatctttgaacttcttcagtaagattcctgaaatagggggaacaagcttccgcctttgcaaaagtaatcgaaataaacggtaaggaacatacttgtttcatggttgtaaatccttgaaaaggagtgtcgtgatggctgattcttttctgttttataatctttcagaagcacagatgacctttcaagatgtgatggaacggcttaaagcctttgttcaaaaggacccccgttcttcttatgtgttatcgatcggaaccgattcacaggtttaccgcgattacacaaagtttattaccgcattgcatttgcatcgtacaggcaagggagcttggggctgcttaaaaaatcatacagtcgacagacccatacatagccttcgggagaagatttcgttagaaacggcgtacagccaagaaacggccgctcatattcttgatggacacttaatggatattaccgatctgctcctgccctttaccggtgagggggcggatcttacctttgaagttcacttggatattgggaaaaaagggcttacaaaagatctgatccaagaaatgactggacgtattacctccatggggattgaggccaaaataaagccggattcatacactgccttcagctatgcaaatcgtttcacaaaataatttggctgaaaaagccaaggtaaatgtcgaattatgcggttgacgtttgttatctgattacttattctagcggtagagctgaaagtaagttgtcttgctttcagaggtattcagtataaaacagggggcctgattgcgaatgagtcttatcggtgaacgatttacagaagaagaacaaaaacttctgctgaatatcctgatcaaccatgagtatgccatcgagctattaagcagtgagatcaacgatatagagacagggaccaaaaacgttgacggaaccacctacaaaaaacttgtaacgctatacgaccgatttcgatttgaaaattaatgggacaccctataattgatactccacaaagagtatcttttttattgaaaggaaacttttcgacaaatactgataaagtttatattattgcaatatagggaatgtattgatgatgaaaatgaaaaggggtcgaaaacatgataagcttacaatcagatcaacttcttgaggcaacagtcggacaatttatgattgaggcggacaaagtagcgcacgtgcaagtcggaaataaccttgagcacgcattattagtattgacaaaaaccggatacacagccatcccggttctggatccttcctaccgtttacatggcttaatcgggacaaatatgatcatgaacagtatttttggacttgagcgaattgagtttgaaaagcttgaccaaatcactgttgaggaagtcatgctgaccgacattccgcgccttcatatcaatgatccgattatgaagggattcggcatggtcattaataatggatttgtctgtgttgaaaatgacgagcaggtatttgaagggatttttacgagaagagtcgttttaaaggaattgaataagcatatacgctcgttgaataagtaggctgtacggcctatttttattatatagccagagcgaaaaaaagaaagcgcatacataatttaaacgagaatagggcttgaataagaaactaagattttattagaatgggagataagaaaaacttattgataacaaaaaggaggacgacatgcagcttcaagagcttcatatgctcgtagttttagctgaggaattaaatatgagaaaggcggcagaacggctttttgtatctcagccggctttatctcagcgcttacaaaccattgaaaaggcgtggggaacaaaaatctttttaagatcccaaaaaggattaacggtaacgcccgccggtgagaaaatcattcagtttgcgaatgatgtgacattagagcaggaaagaataagagaaaatattgacgagcttgaaggtgaaattcacggcacattgaagcttgccgtcgcctccataatcggtcagcattggctccctaaagtcctgaagacgtatgttgaaaagtatccgaatgcaaagatctcgctcataaccgggtggagcagcgaaatgctgaaaagcttgtatgaggatcaggttcatatcggcattataagaggcaaccctgagtggaaggggcgcaaagattacttaatgacagatcatctgtatttagtggatactgaaatttcctgcatcgaagatattgcccatacagaacggccgtttatccagtttaaaagtgacagcacttattttcaggaaattcagcactggtggcatcaaaaatttaaaacgtcgccgaaacagacgatattggttgatcagattgaaacgtgcaaacagatggcactgcacggaatcggttatgccattttgccgtctgttacccttcaaaatgaagataaagtgaataaaatgcctcttttagacatgaaagggcatccgatcggtcgggatacatggttattaggttatgagcctgcctttgaactgaaacaagttcaagcttttgtacaagtgataaaggatatgctggaccaggaaaatccattttaaagacagcgaggtgctgtctttttttttatttatctgttgacaatgaaaatcattatcatttaaagtgatacatatgatattgaaaatcattatcaattaatggggtgataacatggctaaagccttgattacatatgccagcatgtcaggaaatacagaagacattgccttcataataaaagatacgcttcaggaatatgagttggatatcgattgtgtcgagatagatgatatggatgtgtcttgcttaacctcctatgattatgtactgattggcacctatacatggggggacggcgatttgccctacgaagcggaggattttttcgaagaggtcaaacagcttcagcttcatggtttaaaaacagcctgcttcgggtctggcgattattcttatccaaagttttgcgaagcggtgaatttgttcaatgccatgctgcaagaggcgggagctgctgtttaccaggaaacactaaaaattgaattagcgcctgaaacggatgaagatgtggaaagctgccgagcgtttgcgagaggttttcttgcatgggcagattatatgaacaaggaaaaaagccatgtttcataaaggagcaactgctgttacggcatcggcgttttctggatattttgtggcggtacaaagagaaggcatttttcattattctttggagcagggctggagaaagctttttcgtttgaaaagtaagatacactgtatcagctacatagggccttacttatttggtgttggtgaaaagggaacagtcattcgttcggctgatgaagggaaaacctggacgatgtcgagctttccgacaaatgcaacagtgtgggcgattaccggcagaaacaacgggtttgtctgcgcccacggtaagcattgtatttatgtatcggatgattttggtgtctcatggcgcgtagccaaaccttttgccgaatttcataatccccctgttatccggtcgctatgccttcacgggggcaatctttttattggcacgcaaatacacgcatattttggcggcatttgggcttacgacattaagcgtgacactgtccaaattgtcaaaaaagaaaaaaaacggatgacggcatccatgctcgtgttcaatgaaaattggctggtggcggcgatgggttctgtgaaaggaaagcacggtgctgtcactgtacggaatcttttgaatggtgaagaattcaccatacaatccagtatgatcagaaatgaagaatcatttcttgatctttcagaggatgatggcattatatatgtcactacaacacaagatgaaaatggtttttcgagaatttaccaggttgatctcgaagcccgatcgttaaaatggttcgataccattaaggggcatggatggagagtggccaatcagaaagagaatttcttttgcgcaggcttgtatgaatgtaaatttgtccagccgtacgaagtttcagcaatgattcattagaggaggaacaaggaattggcgaagattttgctcgtttatgcaacaatgtcaggcaacactgaagcaatggcagatttgattgaaaaggggctacaggaggcggaagcagaagtagaccgtttcgaagcaatggatattgatgatgcccagctgtttaccgattatgaccatatcataatgggaacctatacgtggggagacggagatctgcctgatgaatttttagatctggctgaagacatggatgagattgatttttccggcaaaacatgcgctgtatttggttccggtgatacagcatatgaatttttctgcggagcggttgatacgctagaggcaaaaataaaagaacgcggtggagacattgtgctgccttcggtaaaaatcgaaaataatccagaaggtgaagaagaggaagaattaataaacttcgggagacaattcgcaaagaaaagcgggtgcgctgtctgatcactcactgggaactgctaaaacggctgttcctttttttcttgtctttgtatctttcctttgatacagtaatgaggtagaaaatcaggaggaggactatacatatgaaaatgatggacgcaaatgaaattatttcatttattcaaaatagtacaaaatctacacctgtaaaggtttacgtgaaaggtgagctggaaggaatcaatttcggtgaatctgcgaaagcttttatcaacggaaacactggtgtcgttttcggtgaatggagcgaaatccaaacagcaatcgaagaaaaccaaagcaaaatcgaagactatgtggttgaaaatgaccgccgcaattctgcgatcccaatgcttgatcttaaaaacatcaaagcgcgtatcgagccgggcgcgatcatccgcgaccaagttgaaatcggtgataacgcagtcatcatgatgggtgcttctattaatatcggttcagtcatcggcgaaggcacaatgattgatatgaacgttgtgcttggcggacgagctactgtcggaaaaaactgccatatcggcgcgggttctgtacttgcgggcgttattgagccgccatccgctaaaccggttgtgattgaagacgacgtcgtaatcggcgcaaatgctgttgtgcttgaaggtgtaacagtaggtaaaggagctgttgttgctgcgggagcgatcgtggtaaacgacgttgagccatacactgtcgttgcaggcacaccagctaaaaaaatcaaagacattgatgaaaaaacaaaaggcaaaactgaaatcaagcaggaattacgccagctgtaaggaaaagtttgataaaaaaggcgtggataatatatccacgccttattcgtataggcaggaggaatagaaatgaagaaagaggagctcatcgcaattcgcagagatctgcatcgtataccggagcttggatttcaggagttcaaaacccagcagtatttattaaatgtcttggaacaatatccgcaagacagaattgaaattgagaaatggcgaacagggctttttgtaaaagtgaacgggacggcgccggaaaaaatgctggcgtacagagccgatatcgatgcgctttctatagaagagcaaactggtcttccattcgcatcagagcatcacggcaacatgcacgcctgcggtcacgatttgcatatgacgattgcactcggcattattgatcattttgttcaccacccagtcaaacatgatttgctttttctgtttcagccggcagaggaagggcctggcggtgcggaaccaatgcttgagagcgatgtattaaaaaagtggcagcctgatttcatcactgcgcttcatattgctccagagcttccggtaggcaccattgcgacaaaaagcggccttctatttgcgaatacatcagagctagtcatcgatctggaaggcaaagggggacatgcggcatatccgcatttggctgaggatatggttgtagcagcaagtacacttgtcacccagctgcaaacgattatctctagaaacacagatccgctagacagtgctgttattacagttggtaccattaccggaggctcggcacaaaatatcattgcagaaacggcccacctggaaggcacgatccgcacgctttctgaagaatcgatgaaacaagtaaaggaacggattgaagatgtagtgaaaggaatcgaaatcggattccgctgcaaaggaaaagtgacatatccgtctgtatatcaccaagtttacaatacgagcggattaacagaagaatttatgtcttttgttgctgaacatcaactggcgacagtaattgaagcaaaagaagcaatgactggagaggattttggctacatgctgaaaaaatatcccggcttcatgttctggctcggcgctgattctgaacatgggcttcatcatgctaagctgaatcccgatgaaaatgcgatagaaacagcggttaatgtcatgacaggttatttttctgtttatgccaattaagcacaaatgaaagaataaaattccataaaatgagcactctagtaaacggaggtgttcaaaaatggctaaaaaaattggaattgaacaatcgttatcagatgtagaagctgctttaaaagaaaaaggatatgacgttgtaatgatgaaaagccctgctgatgctcaaggctgtgactgctgtgtcgtaacaggtcttgataataatgtgcaagggatagccgatacggtaacacaagcacctgtcattacagcttccgggatgacggctgaagaaatttgcagcgaagttgaaagcagaattcagtaatataaaaaccgaagcaaaaagcttcggttcttttatttattctgtttctttagggaaagcgcggtcgaacgcgttctttatttcttttctcaacactcgttcgactcgccactgttccatattttctgttttggcaatgaccctgattacaatttcggaagtccccagttcttgaatgccgatgacatttgggccttcttttatttgtggaagagccgctgcagtttcatcacaaacctgctgtaaaatatgaatcatttcatcaatatttctttcagccggcactttaatgtcaacaagagcctgcatggtaccacgagaatgattgctcacgtttgtgatgtttctgttggggatgtaatgcagtgttccgtcaaagctgcggatttgagttgtccttaagccaacctgctcgacaattccgtcaaaggtggaaacggtaatataatctccgacatccaattgtttctcaagcaaaataaaaaaacctgtcacgatatcactgacaagcccttgggcgccaaatccgacagccaggccgacgattcctgcccccgctaaaagagcgcttggatcataatgaaacaaatctagaaccatgacgaaaaatatgaaaatcaatgtataagcaaatatgttaagagtcaggcttcggagcgtatgtgcacgtccgatagacaagctattctgctcctcgaattttgcaaacagatgtttaatgattttcatgcctaatgatcgaacgataaaatagagcaatatcataatggcgagtttaatgagcagaacaccggcatttgtaatcagtcccgcccaatcatattgtttaataaagtccatgttgagctccttttctaattgattgctgcacattgagactagttaccctgtacatgaccatgttaaacgttttattcaaaaatgtcgaagccaaagacatacatgatttgttaaaaattgactcaggaaatctgcttttatataatggcattgcaatataactaaaaatggttaatcaccctttattttcatgcgattttgacctttaagccaaacaataaattggagggatacatatggcagaacgtatggtaggtaaacaagctcctcgttttgaaatggaagcagtccttgcaagcaaagaattcggcaaagtaagtcttgaggaaaacatgaaaaacgacaaatggacagtgctgttcttctatccaatggatttcacttttgtttgtccgacagaaattacagcaatgtctgaccgctatgacgagttcgaagatcttgatgcagaagtcatcggggtttcaactgataccatccatactcatttagcttggatcaatacagaccgcaaagaaaacggtcttggccagctgaaatacccgcttgctgctgatacaaaccatgaggtatcccgggaatatggcgttttaatcgaagaagaaggtgtggctttgcgcggattgtttattattaatcctgaaggggagcttcaatatcaaactgttttccataacaatattgggcgtgatgttgatgaaacgcttcgtgttctccaggcgctgcaaactggcggactctgtccggctaactggaaaccaggccaaaaaacactttaattctttccaagaacgaaaagcggtctagcatattcgttaggccactctgttaaataggagggaaaaagcaatgaaattacgtcagtccatgccggaattgacgggagaaaaagcttggttaaatggtgaagtgacgagagagcaattgattggggaaaagccgacgcttattcatttctggtccatcagctgccacttgtgcaaagaagcgatgccgcaagtgaatgaatttcgtgataaatatcaagatcagctgaatgttgtagctgtacacatgccccgttccgaagatgatcttgaccttggtaaaattaaagaaacagctgctgaacacgatatcactcagccgatttttgttgacagtgaccatgctttaaccgatgcatttgaaaatgaatatgtacctgcatattatgtgtttgataaaacaggacagctccgtcacttccaagccggcgggagcggtatgaaaatgcttgaaaaacgtgtgaaccgcgttctggctgaaacggaataggtatctgactaaatagtatttcctaaaaacctgatcacatcaggttttttatttgtgcaaaaagcaatggaagaagagtaagaagcttatttttccaaatttgggtataggaattgatggtttgtttgattgatacgctagaaaacacagctaatttttgatgtttttcctcaattttagataaatctcatatctcataactcgaaaattgtagatattacactaaatttctttaaagaagtaagtaaaatatatattttcaacattataccaaataaactagaaagccccttaatcccttgagaataaaggactcttttgaaaaataaaacattttcagaaaataaggaatttttcatagagtaaatataatagtaaaatgctaaaataatagttgataaaattacttttgtaatctaatatcttaattaaagatgttaattttgatagggggtacattgaggaatgtttaatgaaagagaagctttgcgcttgcggttagaacaattaaatgaagctgaagtgaaagtcattcgtgaatatcaaattgaacgtgataaaatatacgcaaaattaagagagctggacagaaatggaagcccttccgaaatcaaaaaggatttccgttctgaaaaaaaacctgactctctgccggttctcgctgagcttgcggctcaggaaatcagaagctatcagccgcaatcacagcagcagtctgttcagcctcagcttcaatctatttcctctcttcctgccggtataccagacggaacaacacgaagaagaagaggaacggcaagaccgggatcaaaagcagctaagctgcgtgaagctgctattaaaacattaaaacgccacaacgcggcgattaagagctcggagcttcaaaaagagattgaaaaagaaagcggtcttgaaatccctaatatgacaacgtttatgcaaagcttaattaaaatgtacccggaagtgaaaaagccatatcgcgggcagtacattttagagggtgaaatcgaatctgcagaatcagcaaatgaataaatataaagaaaaactgcttggcatcgctcaagcagtttttttattgaggttttttctgtgaaggtttgttttctttttcaagattaagcttatacacccacttttgataaggcttttcttcagcggctctgtttctcagctcttcgattgtatggctcttggcctggtctgatgattgggcgtgggcaagctgtttttggagcacatgtatctgtttggtgacatcttcaaggatggtctctacatgatatggctgcgcgtaggccgctggagcttcttcttccgttttttctttttgtttcgtgccgccatcaatatcggcaaaatgagaagcaatccaggcatcgctttcatcaagctgccgtttatacgatataatagtttcgtgaaataatttttctttcgttttttctatgtctagcagtctttctttcgtttctatgattcgatctttcatatgatcaacttctattttaatatgttttagctgatattctttttctaccatttgctcttttagacgcccgttttcggcttttatcaattcggcttgctgttttgcctgaagcagtgcattttgttcctgctcaatcgaggcttgaagttcgctgatccgtttatgaagatttttattttcttcttcgattttgactttcgcaatatgaagtttatgtttttcttcgatttcggctctgcgtttataggtttcagcagatagaagctcctgcaaaacaacgattttatcaagcagttcagctcttatttggtgcagggtttggctggtgtgggaggcatgtttttcttttgttgacatatgtgttaattcggcagacagctgctggagtttttctttcatatcggtattttctttgagcagtttgttatttttctgatgaaagtagcttgcttcaagttcagaaatcagcttatggcaccttgaaagctcggattttaaataaaggttctcctgagacacgtcgtggaaaaaaggacctgatcttttcattcgaaccatctccctcatgatgttaacactacaatatgcaaatactgaacagctattcctctttaataaacagacaagcagtagcgttgagcctttgcttttgctatgcttttaacgaaactagaggtgagatgatatgaagcatgtaaacgtactgctggcagggggagcctcgcggcgatttggagaaccgaaggcgtttgtcaaatggaagggcaggatgctttacgaatgcgctaaagaggcacttggagaacaaacggttatcatcagccgtcccgaatttattgatagatttcaagaaaacggtgaaaatgaagtgtatcaagatgctgagccatttcaaggcatggggccattggctggtatatataccgcttttaaaaagacagacggtgatctttatactgttctttcctgtgacacaccgctgatacaaagaaggacgatactggagctcaaacgtctgatgactgccggttcggacgcggtagtcccaatttcagacggacaagtgcagccattgattgcgatttaccacaaacgtatcatgccagttctatacgatcagctttctgagaagaggttgagaatatcagatttattaggcagaatttcggtttgttacgtacaggctgaaaatatcggagcaaacccggcagagtttatcaacattaatacacgtgatgattttagctgtttggaagaaaaatcgaactccctcaagcgggactgacggggcaataacatgataagatgacataaaagataaggagaacaggtttgatggaggaacgttattcacggcaaatcagatttaagcaaattggggaagagggtcagaaaagactggcagacagccatgtgctgattgtcggagcgggagcgctcggcactgcaggagctgaagggctttcgagagcgggagtcggtacgattaccattattgaccgtgactatgtggagtggagcaatcttcaaaggcagcagctttatacagaaagcgatgccaaactccgcatgccgaaagccatggctgccaaagagcatctatcagcgattaacagcgagatacatattgaggcgtatgttaccgaaggaacagccgaaacgcttgagccgctgattgaaaaagcagatgtcgtgatcgacgcgacagataattttgaaacccgcatgctgataaacgatcttgcccagaaaacaaagacaccttgggtctatggcgcctgtgtaagcagccagggaatgttcatgactgtcattcccggagaaaccccttgtctgtcttgtttgtttgagcaaattcctgtcggcggggcgacgtgtgatactgccggcattattccgcctgctgtgcatatcgtttcagcatatcagcaggctgaggcatttaagctgttaaccggccaaatagaagcaatacagcggggttttgtgacatttgatgtctggaacaattcgcatatgaagattaacgttaatcatgtacgccgtgaggattgcccatcttgcggagcaaatgcggtatatccttatcttcaggattggaatacaccaaaagctgctgtattatgcggccgtgatacagtgcaggtaaggtcagaatcattaaaaagaatcccgaaacaggaactcattaagcggctgaaaacaatcggcaaggtcgaggctaatgcgtttttgctgcatattttttacgaggatttcagaattgtcattttcaatgacggacgggcactggtgcatggaacaaatgatgtgaaagaagccaactccgtgttggcaagagtgattggactgtaacaacaggaggggtcagaatgctggagaaaagaacaccgataccggtagacgaggcagttcggcgtgtctgccattttcaaaaacaaggtgaaacagaatgggtggcgcttgaagacagccttcatcggtttttagccgaagatataactgcggatcaccacgtacctgcgtttgaccgttcgccatacgatggttttgctgtcagagcgtgcgatacggcagaagcttcacgtgaaaacccagttcggtttgaagttattgaccatattggagcaggagcagtatctgaaaaagaacttggcccgtttcaggccgtgcggattatgactggcgcgcaaatccctgaaggggcagatgcagtcgtcatgattgaactgactcaaacctttgaggagaatgggaagtcatttatgtctttaaaacgccgctttcagacgggggataatatttcaaaaacaggtgaggacgctcaaaaagggagtgttttactgacaaagggcacccgggtgacaccaggagtgacggctcttttggcaacattcggatacgcatctgtgcctgtcgtgagaaagcctgtagtcgggattatcgcaaccggtaccgaattgctgaatgtcagtgatccgctggaaccgggaaaaatccgcaacagcaatgcgagtatggtatatgcgcaagcgatagaagcaggcgcaacaccgctttatttagggaaaatctctgatgaattggataaaagctttgctgcagttaaagaagcgatgaaaaaggtggacttcctgatcacaactggaggtgtgtcagtcggtgactttgactttttgcctgcgatctatgaaaaactcggagcggacgtgctgtttaataaagttgccatgcgcccgggcagcgtgacaacggtggcgcatgcaaacgatatgctgctgtttggcctttcaggtaatccgtcggcatgctatgtcggttttgaactgtttgtcaaaccgataatccagacatggttgctcaatgaaacaccgcattcgatttgtgcggaagctgttttgaccaaggattttccgaagccgaacccatttacccgatttgttcgtgcgctcgtgcaccatcaggaagggaagctgttggcgacacccgttggcttagataagtcgagctctgtcacatcacttgcagatgccaatgcatttattatcctgccgggcggcacgcgaggctacgaatctggcagaacggttcaagtgctgctcatcagagaagagaatggaagtgaatggccttggtccgtcctttcccgatcgtccaagttgtaggatttcaaaacagcgggaaaacaacgtttattgagcgcattcttgaaaaagcctctgaacaaggagtctgtttgggctgcctgaagcatcatggtcacggcggtgaaccgcaagcgctcacggaaggaaaagacacggaccgttacaaggcggcaggtgctgatgtaacagcggtagaaggtgctggtgtgttacagctgactgcccgccgcaattgggatttggcacggctgatcgagttataccaatttctcgaaacagactgtcttctgattgaaggctttaaaaaagccccttatcctaaagtggtaattctaagtgaaaaggaagatctggaagcgctgcaagcagtaaatataatcgccatcatctatagaaaaaaagagcatatgacagagcatcagggattacccgtttttcatgcggatgatccggttgccgtggattttgtgctttcacagctgaagggggaatctgcataatggaacggtttgagattacgaaaacacccattaatactgaagacatcattaaaaaagtggagaaacgggaagcaggagccattacgacatttattggtacggttcgggaatggacaaacggaaaaagaacggttcggcttgaatatgaggcatatgaaccgatggccgtgcaaatgcttgctcaaatcggcgctgaaatcgaagaaaaatgggaaggtgcctcagctgcgatcacgcaccgtataggtgtgctcgatatcggtgaagcagcggtagtgattgctgtatcttctccccatcgaaaagccgcatatgaagccaatgagtatgcgattgaacgcattaaacagattgtgccgatttggaaaaaagaaatttgggaagacggtgagcaatggatcggcgaccagctagaaacaacagcttatccgaacggaaaaccagatctaagcgagggagaccagcatgattaaaattcttttatttgcaggactggctgaacaggccggtacacaagcaatagaaatagatgtggaacaagcaaccacagatgaaataaaagcgagtctaaaagaacaatacggtcttgaatctattgatacgtctatgattgccgttaacgaaagctatgtaaaagaaaatacctctgtatcttcgggtgacacggtagccgtcataccgccggtcagcgggggatgaaaaccggacggcatttcagccgtccggtttttctgtatttcattggcatatccccaagtatcctcagcatacaatgattttctgtaagcgtttattctacatatgttactccctataaagtaagagactcactccataattagactgaaattttgaaaaataatagaaatttatttcgggtatcgatatagtgaagatgataaatgttggaaaggtgctggatatggagacatttaaaagattaaaaatgtattattggccgtacagaaaagtgtttatgtggtcgcttctagccatgcttttgatgactgcaattactgtcgtttatccgattatcctgcaaattacgattgatgagatcgtgctgggacggcagtatcagcttgcggcgtgggtcagcttaggatttattgcggtaatggttttgaaaggaatggctaccttttttcatcagtatttaggtgatatgttcgggatcaaatccgtttatcggctgagaaatggtctgtatgaaaaactgcagcggctttctttttcttactatgataacgcgaaaacaggagatttgatgtccaggctgactgctgatgttgaagggcttcgttttttcttatcatacggtctcgctgagctcattcgcttcggcctgctggtagccatcagcctgtcggttatgttttactattctgttcctctcacgcttgtgacaatagctgttctgccatttctcgcggttgcggtataccggtttgacaaaagagtccatcccgccttcagaggcatccgcaaatcgtttgcgaaactcaatacaaaagttcaggaaaatatcagcggcattaatacggttaaatctctttccagggaagattttcagatcagcactttcaataaagccaatgcagaatacagggcgcagtatttacaaacatcatccatctggtctgcgtatttccctttaatggagttcattggtaacatttgtattgtagctcttctctcatacggcggttacttggttatgcaaaatcagctcaatcccggcgagcttgttgctttcttcagccttgtcaattatatgatgtggcccattatgaacttaggttttgtcatcaatatgttctctcaagcaaaagcgtcaggggaacgcctgctcgacattctggaaaaagaagaagacattacaggtcatcctcatgctttgcataaacaaaaattaaccggagatgtccatttcaaaaatgtttctcttgcatacggaaaagaacaaacaaacgcgctgtgcaatgtaagctttgaggcaaacagcgggaaggtaatcggactgttgggcccgacaggttcaggcaaaagctcagtgacacagcttctcaccagattttacagtcctgttagcggaatgattaccattgatcacaaaccaatcacagattattcgttaaaaacccttcgctccaatatcggggtcgtacttcaagaatccttcctgttttcatctacgattagatcaaatatttcgtatgggcggccggatgcctcaatggaagacgtcattgaagcggcaaaaagggcgcaggctcataactttattatggagcttcctgataggtatgacaccatgctgggagagaggggaatggggctttccggcggacagaaacagcgtattgccattgcgagagccatctgcttgaacccgagcattttaatattggatgatgccacaagcgcagtagatatgcaaacggagcacagcatacagcttgccttaaaagaagtcatgaaaaaccgcacaacctttatcgtcgctcaccgcatttcttcactgaaacacgctgatgaaattctcgtttttaataaaggacgcattcgtgaaaggggaacacatcatgagcttcttgaaaaaggcggctactataaaaagatttacgatttgcaataccgtgatgtcaaaatgattaatgagccgcatgaggtcggatagggaggggccaaatgaaacaagcgaaaaaacaggggattttagagcgtttctattactcttcagatgaaatcattgaaaagccgtttaactgggctcaaatgtggcggctgctgagctatgtcaaaccatatcgaaaaacaattttgccgctttcttttctcaccgtattaattggcactgctgtgaagcttgtgatccccattttgatcggcgtttatgttcttgatcaagcgattacaaggagaaactcggagctgctgattcagctcatttttattattagcggtttatatgtcctcaattacgccgccaatgtgttaagaattaggtggatgaatcagcttggccagcatgtcatttacgatttgcgacagcatttatttacccatgtgcagcgcttatcccatcgattttttgatcagcggtcggcgggatcgatcttagtcaggatcatgaatgatattaactctcttcaggagctctttacaagcggagtcatcaatttgttgaccgacttgctgcttctggccggcgtgattattattttgtttacgctgagccctgagctgactatagccatcatggtgacattgccgattatgttttttatttcaacaagtctcagaaaaaaaatacgccgatcctggcaaacggtacggctgaagcaatcgaagctcaactctcatctaaacgaaagcattcagggcatccgggtcacacaggcatttacgcaggaagaagaaaacatggcgtattttgacggtgtcaatcaggagaactacgaatcatggcgggaagcaactagaaaaaatgccatgttccgtccgcttgtagaaatgacgaatgcgattgggacggctgtcttgatttggtatggagccacactcatcatgaatgaaaccattacgattggcgtcttcgtttcttttgctttctatctgggaatgttttgggaacctatttcgagactgggtcaggtctataatcagctgttaatggggatggcatcatcagaacggatttttgagtttctggacgaacagccaaatgtcaaggagaagccgaatgccattcataatgaaaagataaatggggagatcagttttgaagaggttgaattttcgtatgatgaaaaacgaaaagccctttacgccgtttctttctctattccggcgggctcgacgcttgcgcttgtcgggcatacagggagcgggaagacgacgattgccaatttaatcagccgtttttatgatgcgaccggaggcaccattaaaatagacggtataccgattaaggatctttcccttgccagtctgcgctctcaaatcagcattgtcctgcaagatacatttattttctctgggaccatcatggaaaatattcgttttggaaggccaaatgcttcggatgaagaggtgatgaaagcgtcccaagcggtcggagcggatgagtttatttctgatttagcagaaggatacgcaacagaggtggaggaaagaggcagcgtactgtctgccggtcagcgtcagcttatttcctttgcaagagcattgctcgccgatccggctattatcatccttgacgaagcaacggcaagcattgatacagagacagaagtaaaaattcagcaagcgttaaaaacgcttctgaaagggcgtacagcagtgatgatcgctcacagattgtctacgatccgcgacgccgaccgcatcattgttcttgatcacggcaggaaaatagaagaagggaaccatgatcagctgctcgctaaaggaggcatttatgccgggcttgtgaaagcgcaatacagcacagcgatagaataatatgaaaagccttcaatattgaaggcttttggaaatttattagaaaaacatgaaactttttgatatccttcccgtactatttgttagatattctcaaggaggttttgaaatggaaacgaatgtagaaaaaaacagcggaacggcgactgaaaagccttcacttttaggagtaatcacaagtccgtccgttcaatttgaaagaataagagaaaggccggctgtatggggaccgcttttgattgttgcagcaattatcatcgtcggtgccgtgctgcaatcactcggtacggattatagtgagcttttgaaaagccaggatacgcaagggctatctgctgaacaaatggaaactgtcgcaacaataaccaaagttggcggaatggcaggcgctattatcggcggtatcgcagcattatttattgcccctcttatttattggctctgtgtaaaagtatcaggcggtgttacgacatataaaaaaatgctttctctcggtctgtttgtctctttgattagcagtctcggattattggttaatggaatcgttgcttttacgactgacgtgaatcctctttacagcacgacgtcactggcagggattatcccatctgacggggctcttgccagcgtgttaaatacctttgaaattttcagcatctggagctttgtattattagcaatcggacttcacaaaacgggaggcatctcaaaaaaagccgggtggatttcagcaatcattctattcggaattttagttgtattttcgcttttttcaggtttaatcaattctgtggcgggtgcataagctcatgaaaaaagtctggatcggaattggaatcgcagttatagtcgctctttttgttggaatcaatatataccggtctgccgctccgacaagcggcagcgccggcaaggagatacagacggggagcgttgaagaaaatgaaatctcatcaacggttatggttcctggcacgctaaaattttcaaatgaacagtatgtcttttatgaagcggataaagggacattagaagacattaaagtaaaggaaggcgataaagttaaaaagggcacggctttagtcacctatacaaatgagcagctgagcctggaaaaagaacagaaccagttaacgtctgaatccaaccggcttcaaattgaccaaattcaagaaaagttaaaagccttggacagcaaagaaagagaactggaaaaacaggtaggaaagaaagaagcagaaaaacaaatcgaatctgaacggacagagcttcaaatgcagaaaaaaacagcggagatcgaattaaaacaaaccgagcttcagcggcagtcacttgccaaccgggtgtcagatttagaagtgaaaagcgaaattgaaggcaccgttatttctgtcaaccaagaagcggcatccaaaaagtcagatattcaagagcctgtcatacatatcggcaacccaaaagaccttgtcgtctcagggaaattgtctgaatacgatacattgaaagtcaaaaaaggccagaaggtcacactcacttcagatgtaatacagggtaaaacatggaaaggcacggtttccgcagtcgggcttgttccggatcagcaggagagcgctgcggcacaaggaacagaacaggcggtccaatacccgcttcaagtgaaaataaaaggaaatcttccagaaggaaagccaggctttaaatttatcatgaatattgaaacagataaacggaaagcaaatacgcttccttcaaaggcagtcaaaaaagaagatgaccaatattatgtgtatacagtaaaagacggaaaagcaaagcgagttgatgtcaaaatcggcgaagtgacagatgacctgacagaaattaaagaggggcttacccaagatgatcaagtcattttgaatccatctgatcaggtgactgacggaatggaagtgaaatcctaaatgattcagctttctaatgtgcgaaaaagctaccagatcggaaaggaaacgtttgatgttctccattctattgatttggacattcatcaaggtgaatatgtctcgattatggggccgtcaggatcaggaaaatcgacgatcatgaatattatcggctgtcttgatcggccgacttccggtacatatcaattggacggcgaagacatttcttcatataaagataaagaactggcggcagtccgtaaccggtccatcggttttgtatttcagcaatttcagcttcttccgcggctgaacgcaaaaaaaaatgtcgagctgccgatgatttattccgggataggcaaaaaggaacgtcaagagcgggctgagagagcattggaaaaggtcgggttagccgatcgaatgctccacatgcccaacgagctgtcgggcgggcagaagcagcgggtggcgattgcgagggcgatcgtgaatgagccgaaattgattttagctgatgaaccgaccggcgcgctggatacgaaaacaagcgaggcgattatggatcagtttacagcattaaatgccgagggaacgacaatcgttctggttactcacgagcctgaagtagcagattgcacgaatcggatcgtcatggtgcgtgacggaaacattgttcctgccagctccggacaaaggagtgtgggagaatgagcctgttggaaaacatcagaatggctctaagctctgtccttgcccataaaatgcgttcgatcttaacgatgctcggcattatcattggtgtaggctctgtcattgttgtcgttgcggtaggacagggcggcgagcaaatgctgaagcagtcgatcagcggcccgggaaatactgcggagctgtactatatgcctagcgacgaggagcttgcaagcaacccgaatgccgcagctgaatctacgtttacagaaaacgatattaaaggtttaaaaggaatagaaggcattaaacaagtcgttgcttcgacttctgaaagtatgaaagcgcgttatcacgaagaagaaaccgatgctacggttaacggaataaatgatggatacatgaatgtcaattctttgaaaatcgaaagcggcagaacctttaccgacaatgactttctcgcggggaatagagtcggaatcatctctcaaaaaatggctaaagagctgtttgataaaacctcccctctaggtgaagttgtctggattaacggacagcccgttgaaattatcggcgtgctgaaaaaagtaacaggcttgctttctttcgatttaagtgaaatgtatgtgccatttaatatgatgaaatcctcttttggcacaagtgatttcagtaacgtatcattgcaggtcgaatcagcagacgacataaaatcggctggaaaagaagcggcacagctggtaaatgacaatcatggcacagaggattcgtatcaagtgatgaacatggaggagattgcggccggaattggcaaggtaacggcaattatgacgacgattatcggctcaattgcaggtatttcccttttggtcggcggaatcggtgtcatgaatatcatgctcgtatcagtcacagaacggacacgggaaattggaatcagaaaatccctcggtgcgacgaggggacagattctgactcagtttttaattgagtcagtcgtattgacgctgattggcggtctggtcgggattggtattggatacggaggggccgcgcttgtttcagccattgcgggctggccgtcactcatatcctggcaggttgtatgcgggggcgtgctgttcagtatgctcattggtgttattttcggcatgcttcctgcaaataaagctgcaaagcttgatcccattgaagcgctgcgttatgagtagcctcatgcaacatgcatgaggtttttttatgtttagtgatttctactatgaatataaaagacttttttcattaaaataagaagaaaatgtcgtacaattgtccttatttttgtcgaatttacagtttacaaaccctatagacatacgttaatatggagaaacgtgaaagattttgatagttattgaatgaatttgaatgattttagttgcctaaaccgaaaatagcgtttacaatgaaattgtattcaaaatgaatacgttttcattaggaggtgaagcatgctaactcctgaacggcatcaattgattattgatcaaatagaaaagcatgatgtggtaaagattcaagagcttataaatctgactaatgcttctgaatcaacaatcagaagagatttatcgacccttgaagaacgcggttttttaaagcgcgttcatggtggagcggccaagctttctgatatcagacttgaacccgatatgcttgaaaaatcatccaaaaaccttcacgataaattgaagattgctgaaaaagcagcttctcttttagaagaaggggattgcatttaccttgatgcaggcacgacgacattgcacatgattgattttatggataaaaccaaagatattgtcgttgtcacaaacggggtaatgcatatcgatgcattaataaggaaagaaatttctttttatctgcttggaggatacgtaaagcacagaacgggcgcgattattggaggcgcttcattgattgccatggaccagtacagatttgacaagagttttctggggacaaacggtgtccatacagaggctggatttacaacgccggaccctgatgaggcccttttaaaacagaaagcgatcaaacaggcaaaacacgcttacgtcttagcagacccttcgaagttcggagaaatttcattttcggcattcgccggaataggcgacgcaacaatcattacgactgacgctgaagagcttacattcgataattaccaagaaaaaactgtcgtaaaggtagtgaaaccatgatttacactgtaacacttaatccatctgtcgattatatagttcacgttgaagatttttctgtaggaggcctgaaccgttcttcgtatgataccaagtatccagggggcaaaggcatcaacgtatcgagactgctgaaaagacaccatgtggcgtctaaagcgctcggattcgtcggcggatttaccggagaatatatcaaaacatttttacgggaagaaaacctggaaacagctttttctgaagtaaaaggggatacccgtatcaatgtaaagctgaaaacgggtgatgaaactgaaattaacgggcagggaccgacaatttcggatgaagatttcaaagcctttttagaacagttccaatctttgcaagagggagatatcgttgttcttgcaggaagcattccatcttcactccctcacgatacttatgaaaaaatcgcagaggcctgcaaacagcagaacgcacgagttgttctggatatctcaggcgaggctcttttgaaagcaacagaaatgaaaccatttttgatgaagccaaatcatcatgagcttggagaaatgttcggcacggccattacatctgttgaggaagccgttccttatgggaaaaagcttgtagaacaaggcgctgaacatgtaatcgtatcaatggccggagacggagcgcttctgtttacgaacgaagctgtttattttgctaacgtgccaaaggggaaattggtaaactcagtcggagcaggggattccgttgttgcaggtttccttgccggaatttccaaacagctgccgcttgaagaagcattccgcttaggagttacttcaggcagtgctaccgcgttctctgaagaacttggaacagaagaatttgtccagcagcttcttcctgaagttaaggtcacacgtctatagaggaggaaacacaagtgaaaataactgagcttttaacgaagcatacgataaagcttaatattgagagcaaagaaaaagaaaatgttattgacgaaatggtcactgttcttgataaggcaggaaagttaaatgaccgacaagcctataaagaagccattttaaatcgcgaaagccaaagctccacgggtatcggtgaaggaatcgctatcccccatgcgaaaacggcaagcgttatcaacccggcgatcgcgttcggacgttcaaaagacggcgtcgattatgaatcattagacggccagccggctcacttagtgttcatgatcgcggcgactgaaggcgcaaacaacactcaccttgaagcattgtcaagactttcaacgctgttaatgcgtgaagaaatccgtaagcagctccttgaagctgagtctgaagatgccatcatcgacattattaatcagcacgataaagatgatgacgaagaggaagaggaagaagaagcggcaccagcacctgccggaaaagggaaaattttagcggttactgcatgcccgacaggtattgcccatacattcatggctgcggatgcccttaaagaaaaagcgaaagagcttggtgtggaaattaaggtcgaaacaaatgggtcaagcggcattaagcacaagctcactgcccaagaaatcgaagatgcacctgcaatcattgtcgcagcggacaagcaggttgaaatggaacgttttaaaggcaagcgcgtacttcaagttcctgtaacggcgggtatcagacgtccgcaagagcttatcgaaaaagcgatgaatcaagatgcgccgatttatcaaggcagcggcggcggttcagcagcttcaaacgatgatgaagaagcgaaaggcaagtctggaagcggtatcggaaacacgttttataagcacctgatgagcggtgtcagcaacatgcttccgttcgtagtcggcggcggtattctcgttgcgatttcattcttctggggaattcactctgctgatccgaatgatcctagctacaacacgtttgcagcagcattaaactttatcggcggcgacaatgcattaaaactgattgttgcagttctggccggtttcattgcgatgagtattgcagatcgtcctggttttgcgcctggtatggtcggcggatttatggctactcaagcgaatgctggattcttaggcggcttaattgccggattccttgccggttatgttgtgattttactgaaaaaagtatttacgtttatccctcagtcacttgatggattaaaacctgttttgatttacccgctgttcggtatttttatcactggcgtattaatgcaatttgtcgtcaatacacctgtagcggcatttatgaatttcttaacaaactggcttgaaagccttggtactggaaaccttgtgttaatgggtattatcttgggcggcatgatggcgatcgatatgggtggcccgcttaataaagcagcctttacgttcggtatcgccatgatcgatgcaggcaactatgcgcctcatgcagcaatcatggccggcggtatggttcctccgcttggtatcgcacttgcaacaaccattttcagaaacaaattcactcagcgtgaccgtgaagctggtattacatgctatttcatgggagctgctttcgtaacagagggagcgatcccatttgctgcggctgatccgcttcgcgtcataccagctgctgtagtcggtgcagctgttgccggcggattaactgaattcttccgagtaacgcttccggcgcctcatggaggagtattcgtagctttcattacaaaccatccgatgctttaccttttaagtatcgtgatcggtgctgtcgtgatggcaattatcctcggtatcgtcaaaaaacctgttacagaaaaataagaaaaaaagcgtccttggttcgaaaggacgctttttcttatccggccggcagggagcgcggttaagttatgtattttattcttttttatgataaagtaaaagaagagaaacaactgacatagcaattgtctaggaggaaacactttgaccgaggaaaaaaatacgaatactgagaaaacggcgaagaaaaaaaccaatacgtacctggaatggggtaaagcgattgtcatcgctgttctgctggctctcctgatccgtcactttttgtttgaaccgtatttagttgaaggttcatctatgtatcccacattacatgacggagaaaggctgtttgtgaataaaacagtcaactatatcggcgagctgaagcgcggagatatcgttattatcaacggtgaaacttctaaaatccattatgtaaaaagattgatcggaaagcctggagaaaccgttcaaatgaaggatgacacgctttatataaacggtaaaaaagtagccgagccttacttgtctaaaaacaagaaggaagcagaaaaacttggtgtcagtctgacaggagactttggaccggttaaggttccgaaaggcaaatactttgtcatgggagataaccggctgaattctatggacagccgaaacgggctgggactgatcgcggaagatcgaattgtcggcacatcgaagtttgtctttttcccgtttaacgaaatgcgtcaaacaaaataaaaacgccttgctggcctaggacagcaggcgtttttattttgaaaaagaagcgaccaatgcaatgcataaaaccgtgatgaacactgaaccgataatagctagcacactgaagaaaaggtgaacctgtttgttctcttttccgcgcttttctaaaagccgtttagaaaaaatgtgcgaaaatatgtaaataagggctatgcctatatataagccgatatctttggcggtaaagcctgttacggcaaggtaaaagcccgtaaaaaagatcagtaagcaatattcagtaagtgttaaaagcctcaacgtgttcctccatgagagtgtgtaattttccaggcggatgcattctctctctttaattgtaacacagctggctggtttgggtgtataagtgttttctctctgttttatcagggaatcatttctcttgccctgcattcatggtatacttttattgatgatagacatgatggaggataataaatgattgctgtaaataatgtaagcttgcggtttgcggatcgcaagttatttgaagatgttaatattaaatttaccccaggcaactgctatgggttaattggtgcaaacggtgccggtaaatcaacgtttctaaaggtgctgtcaggcgaaatcgagcctcagacaggcgacgtgcatatgagtcctggcgagcgtcttgccgtcttgaagcagaaccattttgagtacgaagagtatgaagtgctgaaagtggtcattatgggccacaaacgcctgtatgaagtcatgcaggagaaagacgctatttacatgaagcctgatttctcagatgaggatgggattcgtgctgctgagctagaaggtgaattcgcggaactgaacggttgggaagcggaaagtgaagctgcgatcctgttaaaaggccttggtatctcagaagatctgcacacaaaaaagatggcagacctcggcggttcggagaaggtaaaagttctcttggcacaggcattattcggcaagccggatgttctgctcctcgatgagccgacgaaccacttggaccttcaggcaatccagtggcttgaagagtttctgattaactttgaaaacacagttattgtcgtatcccatgaccgccacttcttaaataaagtatgtacgcacattgccgaccttgattttaacaaaattcaaatctatgtcggaaactatgatttctggtacgagtcaagccaactggcgttaaagctttctcaagaagcgaacaagaaaaaagaagagcagattaaacagcttcaagagtttgtcgctagattcagcgccaatgcgtctaaatctaagcaggctacatcaagaaagaaacttctcgaaaaaatcacgctggatgatattaaaccgtcttcccgccgctatccttatgttaacttcacgccggaacgggaaatcggaaatgatgttcttcgcgtggaaggcttaacaaaaacaatcgatggcgtaaaggtgcttgacaatgtcagctttattatgaatcgagaagataaaattgctttcactggccgaaacgaacttgctgttactacgctgtttaaaatcatttccggggaaatggaagctgacagcggaacgtttaaatggggtgttaccacatctcaagcgtattttccaaaagacaacagcgaatatttcgaaggcagtgatctggaccttgtagactggcttcgccaatattctccgcacgaccaaagtgagagctttttacgcggtttcttaggacgcatgctgttctctggagaagaagtccacaaaaaagcaaatgtactttctgggggagaaaaggtccgctgtatgctgtcgaaagcgatgctttctggcgccaatattttaattttggatgagccgactaaccatttagacctagagtccattacagcgctcaataacggcttaatcagctttaaaggcgctatgctgtttacttcccatgaccatcagtttgtgcagaccattgccaacagaattatagaaattacacctaacggcatcgtcgataagcaaatgagctatgacgagttccttgaaaatgctgatgtgcagaaaaaattgactgaactatacgccgaataaaaaagcagagatttttctctgctttttttgatacctaaatgtgaaaggagatcacaacatgaaatttttggttgtcggagcaggtggagtaggcgggtatattggcggacggctttcggagaaaggaaatgatgtgacatttctcgtgcgccaaaaacgagctgagcagcttaaagaaaccgggcttgtcatccatagtgaaaaagggaatgtatcatttcaacccaaactaatcagtgccggagaaacagggcaatttgatgtcgttatcattgcttctaaagcatactcgcttggtcaagtgttagaggatgtcaaaccacttatccatcaggaatctgtcattatccctttcttaaacgggtaccgccaatatgagcagctatttgcggcattttcaaaagaacaggtgctgggcggcctgtgttttatagaaagtgctttagacaacaaaggagaaattcatcatacgagcgcatcgcatcgttttgtatttggagaatggaacggcgagcgtacggagcggataagagcgcttgaagaggcattttcaggtgtgaaggctgaagtcatcattagcgggcatatcgagaaggacatttggaaaaagtatctctttattgcagcgcaagcggggatcacaacgttatttcaacgaccgcttggcccaatcctcgccacagaagccggacgtcacacggcccaaactcttattggggaaatttgcgctgttttacgaaaagaaggcgttccggctgatccggatcttgaggaagagagctttcgtacgatgaccaacatgtcttaccatatgaagtcctccatgcttcgggatatggaaaacggccaaacgactgaaggagaccacctgcatggatttttgcttgaaaaagcaaaacgtttatctctcgcagcaccagtattagaaaccgtttatgcgaatctgcaaatgtatgaagcagaaaaataaaaaaaggaggcggaaaagcctccttttatttacttaaaaagcccaatttccgtttctgaagataggctctcttttcccgtctgccgtaattccgtcaatattcatatccttagaaccgatcataaagtccacgtgtgtaatgctttcatttaggccttctttgacaagctcttcacgagacatctgctttccgccttcaatattaaaggcataggcgcttccgatcgccaaatgatttgacgcgttttcatcaaacagcgtgttatagaaaagaatgtttgattgtgatataggcgaatcgtaaggaacaagtgccacttcacctaaatagtgagaaccttcatctgtttccaccagttcttttaaaatatcctcacctttttcagctttaatgtcgactatacggccattttcaaacgtcagggtgaaattttcaataatatttccgccgtagcttaatggttttgtgcttgataccactccgtcaaccccgtctttttgcggcagcgtgaatacttcttctgtcggcatattggccataaactcatggccgctttcattcacgcttcccgcacctgcccaaacatgcttcctaggcagcttaattgttaaatcagttccttcagcttgataatgtaaggcagcgtaatgtctctcgttcaaatggtcaactttttcatgaagattttggtcatgattgatccacgcctgaaccgggttgtcttcatttacgcgtgtcgctttaaaaatttcttcccacagaaggtggatcgcttcctcctctgatttgccaggaaacaccttgtgagcccagcctgctgatgccgcacctacgacagtccagctgactttgtctgattgaatatattgtctgtatgtatgcaatgctttgcctgctgctttttggaatgccgcaatccgtttggaatctataccttttagcaagtctgggtttgacgacacaacagaaatgaaagcagctccatttttggcaagctcttctctgccttttgcttcccattcaggatattcttcaaatgctttaaacggcgcaagttcgtattttaatttggctacttcgtcatcctgccaattcacggtgacgttttttgcgcccttttcatatgcgtgttttacaattaaacggacaaaatcccgaacgtctgttgaagcatttacgactacatactggcctttttggacattaacgccgacttctaccgccagctgtgcatatgtatttaatttctgtgaaaatgaatccatgaatcattcctccaagcttttttctcatcatatcaaatatgatcctataaaggaaagaaggagcccaaagtgaaaaacccaaaacgacacgtcttgggtttttcaatattatggatgattcagttttacagtgccgcctgcaggcgaatggggcatatttgccaaagaaatgctcatgcctccaagaataattccgcttaaaatggctgcgatcgctactcttcttcctaaatctcttagcatctgtttcctccttaacgtttctccatttcccacaatatgaaggaagtgaggaaaaaagaagcaagaaatttgccgcgtgtgagaattttgcgggtaaagactatttaattgccttttgcagcttatcaatcacttctaaagaacggcctgtgccgattgctacagattcaagcgggttttgcgccacgtgtacaggcacgacaatctcttctgtgagccattctttaattccattaaggagcgcaccgccgcctgttaaaataacgccgcgatcaacaatatctccgctcaattcaggcggacagtcctcaagtgtcgctctgatggcttcaagaatatgcaggagggattcacgcattgcatcttgaatttcgttggattgaagcataatggtttttggaagacctgtcacgaggtcacgtccccgaatttccattgcctctggtatatgttcaatcagagcatggccaattttcatttttacctgctcagctgtgcgttcgccgatcagcaaattgtattttttacggacgaaagaaacgatatcctcatcaagctggtctccgccgatcctgatagaatggcaggaaacaacgccaccgaaggaaataatagcgacctctgtcgtccctccgccgatatctactaccacattggcaaccggctcatcaaccggtaaatccgctccgatggcggctgcaactggctcttcgattaaatgaacgtttttcgcgccgcaatttttcaccgcatcactgatggcgcggcgttctactgctgttgagcctgatggtgtgcaaacgactacgttcggttttctgaacgacatgccgatgctttttgcggcttttttcataatgtgctttagcaggtcagttgtcatatcatagtctgcgatcacgccatctttcatcggtctgacagcgacaatttttcccggtgttttaccgatcatgtttttcgcgtcagctccgattgcaagcactgcttttgtcgtcgtatcgactgcgacaacagatggttcatttaggataatccctttatttttgctgtaaacaagtatattagctgttcctaagtcaatcccgatttcagttgattgaaacatgttttcacccaatctctatcctaatttaatatgattctacatttaaagtttctcagaaatactgcgatttttgggggtgtgtgtcggtaaagaaatgtttttgtaaaaaatcaaggaactgtgtaatagaagtaatacatttttcggttttatggaaaaaatatcttgtaattcttatagaaagcgggaaactttttcaaagtttcattcgtctacgatatattgaggtacatccttaaaacattacatgagaaaagaaacatttaaaggaagaagggtttttatgaaatcaataggtgttgtgagaaaagtagatgaattaggccgcattgtcatgccgattgagttgagacgggcattggatattgccataaaagacagcattgagttttttgttgacggagataaaattatcttgaaaaagtacaaacctcatggcgtttgtttaatgactggagaaatcacttcagaaaataaagaatacggcaacggtaaaattacgctaagccctgagggtgcacagctgcttctcgaagaaattcaagccgctttaaaagaataaaattatgctaaaaaaggcggagcgatatcatctccgccttttttgcgtatcaatttttgattaccgccgcctaagataagacatcaagatatttggtaatgaatgatttgggatactttacatattttactcaattatttgtcgaagaatggtacaataagtagagaaacacaagcggcaggtggtcatatgagaaaatatcaagctcgtatcatttccatcattttggcaatgatttttataatgttttgggattatttattttattttataggcaaaaacccgattaattggcctgttgatattgtgtatactgcagtcacgctggtaagtgtctggatgttggcttattatattgatgagaaacagcagctggttaagaaaatgaaggataacgaatggaagtataaacagctttctgaagaaaaaaaccgcatcatggataatttgcaggaaatcgtatttcaaacgaatgcaaaaggtgaaattacatatttaaaccaagcgtgggcatctataaccgggttttcaatcagtgaatgtatgggaacaatgtataacgattacttcataaaagaaaagcacgtagccgaccacattaacacccaaatccaaaacaaagcgtcttctggcatgtttacggcaaaatacgtgacaaaaaacggcacgattttttggggagaagttcattataaactttactatgaccgggatgaccaatttacaggcagcctgggtacaatgtcagatatcactgagcggaaagaggctgaagatgagctcattgagattaatgaacggctggcgagggaatcccagaaactatcaatcacaagtgaacttgccgcaggtattgctcatgaggtcagaaaccctttaacatctgtcagcggtttcctccagattatgaaaacacaatatccggacagaaaagactattttgacatcatcttttcagagattaaaagaatcgatttagtgctcagcgagctgctgctgcttgcaaaaccgcaggcaatcacatttaaaacacaccagcttaatgagatcttgaaacaagtcacgacattgcttgataccaatgcaattctgtccaatatcgtcatagagaaaaatttcaaagagacagatggctgtatgattaatggagacgaaaatcagctgaagcaggtctttatcaacatcattaaaaacggaattgaggcaatgccaaagggcggtgtcgtcaccatttcaactgctaaaacctcctctcatgcagtgataagcgtaaaggatgaaggaaacggcatgccgcaggaaaagctgaagcagattggcaaacctttttattcaacaaaagaaaagggcactggactgggacttcccatttgtttgagaatcctgaaggaacatgacggggaattgaaaatcgaaagtgaagctggaaaaggcagcgtctttcaagtggttttgcctttaaaatcagacagctgagaggagaaaaataaagtgaactcgcttctgtttgtatatgggacattaagaaagcatgaaaaaaaccatcatttgctggcacaatcggcatgtatcaatgagcaggcgagaacaaagggaagtttgtttgctgcaaaagaggggcccacagttgttttcaatgatgaagatgaaggctatatatatggcgaagtatatgaagcagatgaattgtgtatacataagctcgatcaattttttcaaggatatcataaacaaacggtgtttgtagaaacggatgtcgggattaaaattgcgcttatttattttatgaacaaagacgggtgtgccggttttacgaaaataagcagcggcgactggaaagaacatcagatgatcagcaaatcgaaaaatcccatttattattttgcctatggatcatgcatggataatgcccgctttcaaaaagcgggagtcgatcactattttcaagatccagtaggaagagctgttttaaaaggatacacaacccgcttcacgctaaaaagggaagacggttcaagagcggacatgttggaagacggaggaacaacagaaggcgttttataccgtatcccttattctgctctctcctatctatataaaagggagggcgtcgaatctcttacgtatcggccggcatttgtagacgttgaagctggcggaaggcactacaaagactgtttaacctttctcgtcctccaaaaagaagcggaaattgccccgcctcagcactatcagattgaaatcgaacgcggagcggagctgtatttgtcgcctgagtttactgaaaagctcaagcggcatatgaattcgctgccaaaaggataacactgtaacaaaagaatatgataaaatttgatcaatatcatgtcatataaaggagcactacgatgaaaaaagaatttgcggtaattgggctgggccgttttggtggcagtatttgcaaagcattaagcgaagaaggcgtcgaggttatggcaatggatatcgatgaagataaagtcaacgagtatgccaagattgcatctcacgcagttatcggtgattcgacagacgaatctgtcctgaaaaatttaggcctgcgaaattttgaccacgttattgtagcaatcggggaaaatattcaagcgagtattttaacgacactcattctgaaagaacttggcgtccatacgattacagttaaagcgcagaacgattatcacgaaaaagtgctgtctaaaattggtgcggatcacatcgtccacccggaacgcgatatggcaaaacgaattgcgcataatatcgtgtccaacaatgtacttgactatttggagctgtctgaagagcatagtcttgttgaaatcgtagctaacagccgcctggctggaaatacacttctcgatttagatattcgcgcaaaatacggtattaatatcgtagccataaaaaggggcaaggaagttatcgtatcaccgcttgcaaccgaagtcatccaccaagaagatatactcattgttattggatcagttacagacatctcccgtttcgaaaaaagagttcttcatacaaaatagcagccaaataagccgtcctcaaagggcggtttttcatattatcagaatataacaactttaatgaactgagcgtcaatttcttaaaatttcattgactaagcacaggcgttccgatagcatattgtaccatataataaaaaagaggaggggcctatttgaataaagaagcgctagtcaataggctgaatgcttcagccaaaagacaaaaagctgatatcgtcattaggaacggaaaaatcatggacgtttataatcaagaatggatatatgaagatattgcgattacagatggagttattgtaggcctcggtgagtatgaaggtgaaaataccattgatgcagagggacaaatgattgttccgggttttattgatggacatgtacatattgagtcgtcaatggttacaccgattgagttcgctaaagcagtgttgcctcatggtgtgacgacggttgttacagatccgcatgagatcgcgaatgtgtctggtgaaaaagggattgtgtttatgcttgaacaagctcggcatacaccgctgaatatccattttatgcttccttccagtgtgcctgccgcaagttttgagcgatcaggcgcaattctcaaagctgccgatctcaagcctttttatgaagaagaagaagtattagggctggctgaagttatggattatgtgtcggttcagcaggctgaagaagacatggttcagaaactgctcgatgcccgtgtggcaggaaaacggatagacggtcatttagctggtttatcaacagacctcattaacatttacagaaccgcctttgtcttaaacgaccatgaagtaacatcgaaggaagaagcccttgatcgtatcagaagaggcatgtatgtcatgatgcgtgaaggatcagtcgccaaaaacacgctcaatgtgctgccggcggtgaatgaaaagaacgcacgccggttctttttctgtacggatgataagcatgtggatgatttattgtcagagggaagtgtaaaccatcaggtgaaaatggcgattcaagctggacttgatccgtttttagcctatcaattaggaagcctcaatgcggccgaatgctacggattagatacaaagggagcgattgccccgggttttgacgctgatttgctctttgtatctgatctggaaaatgtcactgtcacaatgacgatggtaaaagggcagactgttgctgaagacagcaaagcggtttatcaggatcatgcttcaactgcagcaccagatcaggcactgcttgattctgttaagcttgctgctcctcttaacaaacaggattttcatatgccaatcgattcagaggagcagatcaatgtcattcaaatcataccaaatcagcttgaaacacgattagtacaagttccggctcctgatgcccgcgaatttgagcctgacactgagtttgatttgttaaagattgcagttgtcgagcggcataaaggattaaaagaaaccggacttggtattgtgaaaggttttggattcaagagcggagcgattgccacaaccatttcacacgactcccataatattattgctgtcggaacgaatgatgaggatatcgcggcggcagttaataagctgcaggaaattggcggaggattaacgattataaaaaatggggaagagctccattcagtaccgctgccgattgcagggttattatccgaccaatctgcagagcaagtgaatcaaagcttgctgacgcttcatgataaattgccgttaatcggtttcacaggcggatttaatccatttttgacattgtcgtttttagcgttgcctgtcattcctgatattaaaatgacgactacgggattattcgatgtaaaatcatttcaacacatatcactgcaataaaaagaggcactccctaagggagtgcctctttttttaaacctccataatgatcggcaggatcattggacggcgctttgttttttcgtacaagaaaggtgcaagcgtgtctgtaatctcatttttgatttcagaccattgagtcgtttttcgttccattactttttgtaagtgatttgaaatgagctcttgagcgtcgttgatcaagtcgccagattctctcatgtacacaaatcctctggaaatcaaatctggacccgctgaaatcttgaagtcgtccatgtcaatgctgacaacaacgatgacaagtccttcttcagagagaattctgcgatcacgaagtacgatattgccaatatcaccgataccgcttccgtcaatgtacactgaaccggacgggatttttcctgcaactgaagcctcatcgcctttaagcgctaatacttcaccattatccatgataaagcagttttcctctgggatgccacaatctgttgcaagcttgacatgcatcttttgcattctgtactcaccgtgaatcggcatgaagaatttaggcttgattaaacgaagcatcagcttctgttcttcctgtccgccgtgaccggatgtatggatatcgttaagagggccgtgaataacctcagcacccgcacgatacagctggttgattgttcgactcacgctgattgtgttgcctgggataggggatgaagaaaatacgaccgtatccccaggattgattgaaatttggcggtgtgtgccgtttgcaattcttgataacgccgccattggttccccttggcttcctgtacataaaattgttactttattagcaggcatacgattgatttcgttatgctcaataaacgtatttttaggacagttaatataaccgagtgtctgtccaatttcgatagccgattccatactgcgtccaaatacggcaacttttcttccattttgtacagcagcttcaattacctgctgcaagcggtgaatattcgacgcaaatgtagcgaagataattcggccgtccaccttgcggaaaatgtcatgaatgctttctcctacacgacgctcagacatggtaaactccggattttcactgtttgtgctgtctgaaagaaggcacaaaacgccttctttaccgatttcggccattttcgttaagtttgccggctcgccgactggagtaaagtcgaatttgaaatccccagtatgtacaatgtttccgggcggcgtttttacaacaatgccgtaggaatccggaatactgtgtgttgttctgaagaatgacacagccgttttgcggaactttacaatatcatcctcgccgataatgttcagtttcgtctgtctcaataatccatgctcttcaagtttattccgaagtaagccgatcgcgagttttccgccgtatacaggaatattcacttgtctgagcaggtatggaataccgccgatgtggtcttcgtgcccgtgggtgataaaaagccctttaattttatcttcgtttttgactaaatacgtataatcagggatgacgtagtcaattccgagcagttcgtcctcgggaaacttgatccccgcatcaatcagtacaatttcatcctggaattgcaccgcgtacgtatttttaccgatttcgcccaaacctccgagggcgaaaacagcagtctgatcattttttacaaatttcataccgctcataactccaatactttaaaattttcgctctgttgttcatattctaagaatgcaccatcaacaggtgtaataaactcaatattaaatttcttttctttcagctttgttctgacgtcacgctcagatacgccttcaatataaagtgaatctgtcttttcccgaacaggtacttcgtcagccttctcttgataaaataccttataaatcattccaaatctctccttaaatgccgtatgttagactcgctcattctattatattcgaaaacggaatataaggaaagccttgagcaaaataaggatctctcaaatagtgaaagatcccttgtcaggcaattgctttcttacggagcattccgttccattgtcttctgagtttctttcttaatttacgcagcattagccagtccctcctttaatgaaaaatttgtcccagagttcttttatacaaatagtatacggagattgaggaagacttttcgtggttattaatggaatttaatatgatttttgaacgaaattgtttgctgaatgacaatctttttgtatgatgagggtgggaattgcagaccaagacgataaaggggaagttgcgatggattctaaattaatcttttttgatattgacggcacaatatatgatcatgataagaatataccggaaagtacgagaaaaaccgtggcggagcttcagcgccaagggcatcatgtgtttattgccagcggccggtctccatttttggttaagccgattttggaggagctgggcatccactcatttatttcctacaatggacagtttgttgtctttgaaaatcaagtgatttataaaaatccgctgcctgaaaatgcaatcaggcgattattaaagcaggcggatgaaggcaagcatcctgttgtgtttatggctgaggacacgatgaaagcgactgttgcggatcacccccatgttctcgagggaatcggcagccttaaaacagattatccagagaccgatgaccttttttatgaaggaaaagaaatttttcagcttcttttattttgtcaggatgaagaagaaaaagcttatgccgcttttcctgagtttgatctagttcgctggcatgagctatcgactgatgttctgccgcacggaggttcgaaggcagaaggaatcaaaaaagtgattgagcgtcttccgtttgatatcggcgatacatatgctttcggcgacggattaaatgatttgcaaatgattgaatacgttgggacaggcgttgctatgggaaatgctgttcccgaactgaaagaaatcgcggactttgtaacaaaaccggtggacgaggatggaattgcatacgctgtcaaagaattgggccttttaaaataaagaaacggctggcattgtgccagccgttttctcttttagcgctcaattgcgattgcattttcaggttctttgaaaggattttccttatcaatatgatcatagaacataacgccgttcaaatgatcgatctcatgctgaaacacaatagccggaaatccttttaaacgaatatcaatattttcgccttctagtgttgttccttttactctgatgcgagcatagcggggaacataaccgggaatcgcttcatccacagagaggcagccctcgccgcttgttaagtagcttttttcaactgaatggctgacgatcttaggattaaacagagcatagctgtataatttaccggaagcatcttccgcatgaacggcgatcattcgttttttgatattaatttgaggagctgcgagtcctacgccagggcgcagcttgtatttttcggctaattctggattttggctgtttttaacaaattcgatcatgtcggccagctgctgtttttctgcatcagttggaggcagctcaacaggttcggcagtctctctgagggctggatggccgtcacgtacgatgttttccatagtaatcaagaaacttcactcctaaagcttaatatgtaaattatatcggatttcttcacaaaggtgcaacgaaacgaatgaccagccgtatatggctggtcaatttcatgctgtgtggttagcaacagcctccacctaaataagcagctccgacaatgattaacagaatgaataaaacaacgattagcgcaaaggtgcggccgtagccatatccgcagccaccatatccgtaaccaccataactgcagcagcctccgccgtaaccatatccatacatattacataacctcctcttttaattacgccagagcctttataagtaggcatagcgtctaatataacctatgtaaaaacaaaaaagttgtatggtcatctgtcctgatttttcacttttttgatttaatttcagtattgcatttatacagcacggctattgccaaatgtccccatggattctatagtagaaattgtcaagattgggggatttaacgtgaaagacgctataaaacggcggcctggaatgaagatcggagctttttgtgccatggcactgatattaacaggatgcatgggacaggacccggttgattcagttcatcattcattagaaaaagccgcggaatcggaaaagccgtttcaagaagaacaaaacacactcaaagaattagaggccaaagaaaatcagctttacgatagtgttatgaagctcaatatggatgattataaaaaaattgttgctttatctaataaggcgcttgaaaatgtcagcaaacgcgaagaacacctagagcttgaaaatgacagcatgaaaaaatcggaaacagaatttgaggaagcaaaaacgtcagcggaacatattaaggaaaaagacataaaagaaaaggccgatgccgcagcaaaccatatggagaaaagatatacatcatatggcactatgtataaagagtataaaaaagcgcttgagcttaataaaaaactgtatatgcagctgaaagacaaagatttgacaagagatgatctggatcagcagatcgataaagtcaatgcttcttatgaaaagatccttaaatatagcggagaatttaatgaacaaaccgaaaaatataataaagcccgggaagatttatatgatgctgcaggctatcgtgtgaaaaagagctgactcgatcagctctttttttgaatgaaatgcgattcggatttcgttcaaaattttcatttctattgtagtacagcatagtaaggtatactagtacagttttgggtgcggttggcatctgtttttttgatgaaaatgtaaagcgaatacatttattgaaaatcagcgatgaaaacgattgacggttcttctttatttggtgtaaactaatccatgttaagcggtgttgtattagttttttacaacttcgaaataatacagttcaaagcagagtgtaactatcctacataaaaggttttggcaaactggggatcggctaaaatataatacgacttactgctgatactttagggtaccctaagtttgtatgtataaaaggaatgcacgtctaatgactgtttaaaagaaaggaagaggtgacttagtatggctgcaaaaacgaaaaaagctatcgttgacagtaagaagcaatttgatgccattaaaaagcagttcgaaacgttccaaattttaaatgaaaagggagaagtcgtgaatgaagcggcgatgcctgatttaactgatgatcaattaaaagagctaatgcgccgcatggtatttacgcgtgtgcttgaccaacgctctatctcattaaaccgtcaaggacgtctcggattttacgctcctactgcgggtcaagaagcttctcagattgcaacgcatttcgcgcttgaaaaagaagactttgttcttcctggataccgtgatgtgcctcagttaatttggcacggccttccattatatcaagcgtttcttttctctcgcggacatttcagaggaaaccaaatgcctgatgatgtgaatgccctttctccacaaatcattatcggtgctcaatacattcaaacggccggtgttgcgctaggtcttaaaaaacgcggtaagaaagctgtcgcaatcacttacactggtgacggcggagcttctcaaggggacttctacgaaggaattaactttgccggagcttataaagcacctgcaatcttcgtggtacaaaacaaccgttacgcgatttcaactcctgttgaaaaacaatctgcagctgaaacaattgcacaaaaagctgtagctgccggtattgtcggcgtacaagtagacggaatggatccgcttgctgtatacgcagcaactgctgaagcacgcgagcgcgcaatcaacggcgaaggtccaacactaattgaaacacttacattccgttatggcccgcacacaatggctggtgacgatcctactaaatatcgtacaaaagaaatcgaaaatgagtgggaacaaaaagatccgcttgtacgcttccgtgcgttccttgaaaacaaaggcttatggtctgaagaagaagaagcaaaagtaattgaggatgcgaaagaagaaattaagcaagcgatcaaaaaagctgatgctgaaccgaagcaaaaagtaactgatttaatgaaaatcatgtacgaaaaaatgcctcacaaccttgaggagcaatttgaaatttatacacagaaggagtcgaagtaagccatggcgcaaatgacaatgattcaagcaatcacggatgcgttacgcacagaactgaaaaatgacgaaaatgtcttagttttcggagaagacgttggtgtaaacggcggcgtattccgtgcgacagaaggattgcaaaaagaattcggtgaagaccgtgtgtttgacacgccacttgctgaatctggtatcggcggtcttgcccttggtttaggcttaaacggcttccgtccggtaatggaaatccaattcttcggatttgtttatgaagtaatggattcagtttctggccaaatggctcgtatgcgctaccgttctggcggacgctggacttcacctgtaacaattcgttctccattcggcggcggtgttcatactcctgaacttcacgctgacagcttggaaggtcttgttgcacaacagcctggtatcaaagttgtgattccatcaactccttacgatgccaaaggacttttaatttctgcgatcagagacaatgatcctgttgtcttcttagagcatatgaagctttaccgttctttccgtcaggaagttcctgaagaagaatacacaattgagcttggaaaagctgacgtgaaacgtgaaggtactgatctttcaatcattacttacggcgcaatggttcatgaatcgttaaaagctgctgaggagcttgaaaaagacggcatttctgctgaagttgtcgaccttcgtacagtaagcccacttgatatcgatacaattatcgcttctgtagaaaaaacaggacgcgcgattgtcgttcaagaggcacaaaaacaagccggtattgctgcaaacgtagtagcagaaattaatgaccgtgcgatcctgagcttggaagcacctgtacttcgcgttgcagcgccagatacagtatttcctttctctcaagcggagagcgtatggcttccaaaccataaagacgttcttgaaacagcaagaaaagtgcttgaattttaatcaaactgcataatcgagagggaagatgaacgttttccctctattatatatctgttttcaatgcttacgatgtaaactttaaaattgcttaatcaaactaggaggtcgagaactgtggcatttgaatttaaacttccagatatcggggaaggtatccacgaaggcgaaatcgtaaaatggtttgtcaagcctaacgacgaggtagacgaagatgatgtactggctgaagtccaaaatgataaagcagtagtagaaattccttcacctgttaaaggaaaagtattagaattaaaagttgaagagggaacggttgcaactgttggacaaacgattattacgtttgatgcacctggttacgaagatcttcaatttaaaggcagcgacgagtctgacgatgcgaaaactgaagcacaagttcagtcaactgcagaagctggacaagacgttgcgaaagaagagcaagctcaagagcctgcaaaagctactggcgcaggacagcaggatcaagctgaagttgacccgaacaaacgcgtgatcgctatgccttccgtacgtaaatatgctcgtgaaaaaggcgtagacatccgtaaggttactggttcaggcaacaacggacgtgttgtaaaagaagatatcgacagctttgtaaacggaggagcgcaagaagctgcaccgcaagaaacagctgcaccacaagaaacagctgctaaaccggctgctgcaccagctccagagggcgaattcccagaaacacgcgaaaaaatgagcggtatccgtaaagcaattgcaaaagcgatggttaactctaaacacactgctcctcacgtaacgttaatggacgaagtggacgtaacaaaccttgttgcacatcgtaaacagttcaaacaggttgctgctgatcaaggaatcaagctgacttacttgccttacgttgtaaaagctcttacatctgcactgaaaaaattccctgttttaaacacgtccattgacgataaaacagatgaagtcatccaaaaacattacttcaacatcggtatcgctgctgacactgaaaaaggcttgcttgtaccggttgtgaaaaatgcagatcgtaaatctgtctttgaaatttctgatgagatcaatggccttgcaacaaaagctcgtgaaggcaagcttgctccagctgaaatgaaaggcgcatcttgcacaattacaaacatcggttctgccggcggacaatggttcactccggttatcaaccatccagaagttgcgattcttggtatcggacgcattgcagaaaaagcgattgttcgtgatggcgaaatcgtagcagctccagtcttagctctctctctcagcttcgaccaccgtatgatcgacggagcaactgcgcaaaatgcattaaatcacatcaagcgtttactgaacgatccacaattaattttaatggaggcgtaatgttatggtagtaggagatttccctattgaaacagatactcttgtaattggtgcgggacctggcggctatgtagctgccatccgcgctgcacagcttggacaaaaagtaacagtcgttgaaaaagcaactcttggaggcgtttgtctgaacgttggatgtatcccttcaaaagcgctgatcaatgcaggtcaccgttatgagaatgcaaaacattctgatgacatgggaatcactgctgagaatgtaacagttgatttcacaaaagttcaagaatggaaagcttctgttgtcaacaagcttactggcggtgtagcaggtcttcttaaaggcaacaaagtagatgttgtaaaaggtgaagcttactttgtagacagcaattcagttcgtgttatggatgagaactctgctcaaacatacacgttcaaaaacgcaatcattgctactggatctcgtcctatcgaattgccaaacttcaaatatagtgagcgtgtcctgaattcaactggcgctttggctcttaaagaaattcctaaaaagctcgttgttatcggcggcggatacatcggaactgaacttggaactgcgtatgctaacttcggtactgaacttgttattcttgaaggcggagatgaaattcttcctggcttcgaaaaacaaatgagttctctcgttacacgcagactgaagaaaaaaggcaacgttgaaatccatacaaacgcgatggctaaaggcgttgaagaaagaccagacggcgtaacagttactttcgaagtaaaaggcgaagaaaaaacggttgatgctgattacgtattgattacagtaggacgccgtccaaacactgatgagcttggtcttgagcaagtcggtatcgaaatgacggaccgcggtatcgtgaaaactgacaaacagtgccgcacaaacgtacctaacatttatgcaatcggtgatatcattgaaggaccgccgcttgctcataaagcatcttacgaaggtaaaatcgcagcagaagctatcgcaggagagcctgcagaaatcgattaccttggtattcctgcggttgttttctctgagcctgaacttgcatcagttggttacactgaagcacaggcgaaagaagaaggtcttgacattgttgctgctaaattcccatttgccgcaaacggccgcgcgctttctcttaacgaaacagacggcttcatgaagctgatcactcgtaaagaggacggtcttgtgatcggtgcacaaatcgccggagcaagtgcttctgatatgatttctgaattaagcttagcgattgaaggcggcatgactgctgaagatatcgcgatgacaattcacgctcacccaacattgggtgaaatcacaatggaagctgctgaagtggcaatcggaagtccgattcacatcgtaaaataattttcatatcaaaaacagccctcgctcaaagcggggctgtttttttattttgacagcacatgctgtaatggtttaatgatgtcttctttctttttcacacatccctcgattttcaccacgacatggcgctgatcaacaaccataagggtagggacagtttcaatctcatcttcccagccttcttttttatcatagaccttcattttatctatttgctcgggataatctttttctaaatcaagcagtgcatcgtaataaggcgcttcctggtctatttggttctcatcagaaaaaaacaggatttgtgtatgatgaatgttgtcaatccggctttttttcatcggattgatggtggaaagcgtacagcccgataaagcaaatactattatcagcatggggaataccgcgcgatatcgcatctatcttctcctctgtataaacagtagttaactagctttagtttatcacgagaggcggcttaatctgcttcttgttacctaattgttatataattgaaaccgtttttaaagtgagattacatattatatcaatcgtttaaaatagcaacctggggtatattgaattttttgctgcattcttggatgaaagttcaagaaaacgtgaaattacattatgtgctgtggcatatatatcgagtaaagcttctgtatgaagaagatattgtatgagggaaaatggaaaagcacggtctatatgatgatctaaaattaaatgtgttatacagtttattgttgacattttaaatgtgacatattaatataataacaacaaaagaaattaagcgttttcaaatttcaaagaaatggggaataagagatgggtacgattgtttgccaagattgcaacgaagccattcattactttgaagatgagaaagtgacaacattatacggaacatgctgcggacaatgtcaatgtcctgttgatgaagagtaaaaaaaagcatgcggctttaagccgcatgctttttattttttattgaattgctttttgttctttgatgacccggatcatatgtaaagtcgagtcctcaggtccttgaacagggaggcctgcgtcaaggtttttaaaaatgtagctgatgttttcttctgtaataatttctcctggaatgaagattggaataccaggcggatataccatgacaaattcagcaataatccgtccggatgcttcttttaatgggatgacttccgtatttgcataaaaagcatcacgcggagtcattgccaataaaggtatttctggaagcagaacctcagtttgctgatgtgttacatcttgttctgacatttgctgtgcgatctcagttaaagcctctacaagccggtctgcatcattttggctgtcaccaggagtgaaaatacacaaaatattgtacagatcagaaagctcaacctcaatattaaaggattcacgaagccatttttccacgtcatgtcctgtcaggccaagacttttcacagagataatcaattttgtcggatcatagctgtaagctgctttcgaaccaagaatctcagaaccgacacaataaatgccttcaatctggttgaggcgatctctcgtctgattggcaagcttgagtgtttcctcagcaagctggtggccttctgttgcaaggcgttttctggcaacatccaaagaagcgagaagcaagtaagaagttgacgtagttgtcagcatgctcaggatggattgcactctgtcttttgatacaaggccctctctcatgtttaaaatcgaactttgcgtcagtgatccgcccagcttgtgtacacttgtcgctgctatgtccgctcctgcctgcatagccgatagcggcaattcgtcgtgaaaatgaatgtgaacgccgtgtgcttcatccacaagcactggcacatcaaacgaatgagcgagttctacgatgctttttaagtcggctgcaacaccgaaatatgtcgggttgatgacgagaagcccttttgcatccgggtgctcggtaagcgcccgtttagcagattcaagtgtaattccgtgggagatgcccaattcattgtcaatttcaggatgaataaaaattggaaccgctccggaaaatacaatagctgtcataattgatttatgaacatttcttggaataataattttatcaccaggtccgcaaacagccattaccattgtcataatggcgccgcttgttccttgaacagaaaaaaatgtatgatccgctccaaatgcttcagcagccaggtcttgtgcttgtttaataatgccttttggcgcgtgcagatcgtctaatggttcaatattaatcaaatctatgcttaacgcgttttcaccgataaattgtctgaattctgggtccattcctgccccttttttatggccgggaatatggaattgaacaggctgtctgcttgcatgctttttcagtcctgtgtataagggtgtttcatgttgcgacaattgttttcccacctttgtaatcatacctatgcataatagtgtgtattaaaatcagtttctcaaccgttttttagacgtaaaacaaatgaattatattatgaacttgaaagaatgtaaagaacaatttatgatcaaatgaagatgctttctcttaagggaagtaaatctacaaggagtgaagaaaatggagtatcaatatccgatgaatgaagattggacaaccgaagaagcagtggatgtgattgcatttttccagcaggttgagcttgcatatgaaaaaggggcggatcgtgaagaactgcttaaagcttaccgccgtttcaaggaaattgtaccggggaaggccgaggaaaaaaagctatgcggcgagtttgaggaacaaagtacatattctccttatcgcacggtcaaacaggcgagagaatctgatcaggcgaagattaagatgtaggaaaaagagctgggggatatcccggctcttttttatgcttgtgatactttttgggtgagacggtacagaaaagcaagctgcttaaaggcatcgtcgatacgctgaaggaattcctggttattcatattcagcacttcttctttttggagctggatgccgcataacagctcggctttctttacagtctgcaaacgctcaaacagtgtcttcagctgttccttgtccatttcagactgtttatgtactcccggttttgtgtgatctgcagaccaaacgaagctgtcagggatatttttcgtaatggtttcttggttcatttcaagcaatttgccgtattcttctttgataggggattcataaataatcgcaaaccacacaaagacgtggctttcccataaaccaatttggaaatgcggcagttttttatagcctcttttgctgtttgcgaacgccacccagctgtcagccgggggattgacggatcttcttgcgtgctttgccacatgcgcaaacatttcatctccggttaaagctgataaagttggggcaaaatgttcgcctagagctgtaagcttcggacggaccgtctcttttaatacttccatgcgcgcgtctaagccttctattgtaaaagtgttaaagtcctcttcagtgaaacgcatttgtgtcatgattttcctccttcatgctaagtatacatattttatcacagttcatacgagcttcaaaaagattgagtgcgtttgaagtaaggggaaatgtggtaataaacgaataggtaaacacacaattttcagaatcatgttgcgcgtaaatagaacaatcatacgatataagaagtaatcattgttgaatggcaaaatgggatgcttttttacaaacaaatgatctctggaaggggcgaaagacaatgaggcaagttgtaaaagagggatttaaggaagagaaaaacaatcgtgttgctgtctggagactagaggttgattatgaattggcaaccctatatgaagcaatgcagaaagaaaatgaagagcagattgaacaaagcaaaaacaaacttgagcgacttagaaaagaatggattcgtcttaacgggtaaaaaagcgatagtgaaaacgaaccgcatgaatggttcgtttttacgtgagaagggatatttttcattttccttgctttttcattgccgttatcagtatcctataaaataaaaggtctacatagaagagaggtacgaacgaatgacaaattggacggaaattgatgagattgcaaagaagtggataagagaagcaggcgcgagaattacacaatccatgcatgaaagcctaacaattgaaacgaaatcaaatccgaatgatttagtcaccaatattgacaaagaaaccgaaaagtttttcattaatcgaattcaagaaacttttccgggacatcggatactcggtgaagaggggcaaggagacaaaatccactcacttgagggagtcgtatggattattgatccgattgatgggacgatgaattttgtgcaccagcaaagaaattttgcgatttccattgggatttttgaaaacggtgaagggaaaatcggtttaatttatgatgtggtgcacgatgagttgtatcacgcatttagcggcagaggagcttatatgaatgaaacgaagctggctccattaaaagaaaccgtcattgaagaagcgatacttgccattaatgcaacatgggtaacggaaaacagaagaattgatcaaagtgtgttagcgccactcgtgaaaagagtcagaggcacacgctcctacggttctgccgctttagagctggcaaatgtcgcggcaggaagaatagatgcttacatcacgatgcggcttgcgccatgggactacgcagccggctgtgtgctgctaaatgaagtaggaggcacctatacgaccattgaaggagagccgtttacctttttagaaaaccacagtgtgctagccggaaacccatctatacataaaacgatatttgaagagtatcttcatgctcggaagtaggccatttgagcaggatgatctcagcttgttagaaaagctcgcagaggctcaacctgtatggaaagaggaggagtttggagataaagatgcagaagactatatcatttcctactccatgtacaacggttcatggcttgtatgggaaaaagacggtatgcctgttgccgtcagctaccatctcgagtggtctccttcaaacggtaagccgtggctcggaacggtcctgattgacccggctgaagaaaaaaagggacatgcgaagatgatcattgaacagatcagcaaattgcttagagccaaacacaaagcgatgtttgcgggagttcccattgagcgcagtgaatggatactgtttttaagccaatgcggctttgaacagctgaaaacggaaaaagatgagaaaggcaaatcatttatgatcttggtgaagcctttagcagaagctgccgtatgataacgacagcttatttgctgcatgcgggttcaataaaaagcctctcaaacattgagaggcttctgatgatttgaaaattatttttttactgcatgaatataatgaatcgtttcaaacgctgacaaattgtcttttcgattactaaagaaaaggtcattgatgtcgtctggtgatagatgttcatagatcagtaaaccagatgactctaacagatgttcaatctcttgataagtgaaacatgatttcatcggttccccgcttgcggcagccatcttcaccatatgttcaactcgatttgacgtcccttttgctgtaaaaagtgtttcgtccgcataatcaaaaacaatagagcttccaggcgggacataagaaaataaattgctgatcaagcttgcattttcttcccgtgttacataataagacactccgagaaggctgaagaatgtttttgtgttcttaaatccttcatctaagagaggatcatacgaaaacgttttggtgaaatccataggaacaaaatgaagatgacccggaattgtcagatttgcatccttcagcttattttttttgaattgctgtgtagccggatggtcaacctcgaaaacctgtaagctgttttctaattctggatgccgaaagcagaaggtatccagccccgctccaagaatgacatactgttttgcccccaggattaattcgttgtgcaagactttttcacaataagaagcacgtgctagtggcgtgggagacagctggatttgtgcaacccattttaatattttttcaggatcattttgaagacgttcggcgatctctttgttgaaaaacgatattccttgaatcatatttttactgatgtcgataaactctttttcgttaatgagatcttttgcgataaaatcatcaaaaataagagatgtgtcatatttgctgtgataagcacgggcaaacgctgaaatcaaagacgttaagctggactcatttttcctcatgaaatgatcctccacaaaaaataagattctcctggccaggagaatcttattatacatacaaatatattaatagtaaattttagcataaataaatttttttgtcaatgtttttgctcttaactggacgcgcgatccttcacatagccacgtgacctgtagcagaattcgtctatcaattatgtggactgaatcattagcttttataaaatgcgtacttgcggctgcatccctctttttgcaaatcaggagcggttttctgtctcatggcagcatcttttcgtcgtttcagctgagagagaaatcaagatatgtaacaataaaagcctgagggatctcaggcttttcctaatattacaatccaacagcattccaggctgcttcaactttagcggcatcagttgagccgtagaggtcacgggcagactgaatgagagctgccttggcatctttgaacgtggaagaaggcgtgaggtacgttgttaacgcacggtaatagatttgctgtgatttagatacaccaagttttgtgatggtgttgtaagcggctttgtttggaattccgctgtttgtgtgtacaccgccataatcgccttcatctgtgtttggaaggtttcggtaattggcgtaattgtcaggctggttgtattttgtagggttggacaggctgcgaagagcaggctggctgaccgtaatgtcttcaccgatgtcccagtcttctgtatcgttaaaatacccgaatacgtcagagaaagactcgtttaatgcacctggctgattttcataaatcaagttggctgtttcttgggtgacgccatgtgtcatttcatgcgctgtcacatctaatgagccggaaagcggagagaagaatgaaccgtcgccatcaccgtaaatcatctggtctcctgtccatgcagcgttattgtattgagtgccatagtgaacggaagaaacgattttactgcctttgttatcatagctgtttcgtttaaagtttgaataaaaataatcgtacactttaccgaggttatagtgtgcgtcaacggctgcccgctgtgatgaagatgtaaatgttttcgttgtgcttgagacaagcgttcccggaaggcggctttgtctgttttgcaaatcatatgtgatgatttgggtgcctgttggttttgaaagatctcttagaacatattttccgccttcataagagatgttcaaaggaacagttgcgccctttagagttgttccgcttccagtggcggcggcatgttctactttattttgctgttttaaaatgctgcctgtttcggcgtcaactaagacttcccagtttgcaggttcaggctcgacatagcgaatcgtcacgtcgtaagcaagacgatagctgccgtcttttgtttctatggctttcaattcggctttattgctgtttttggccgctccgttagaaacagcgtctggtgatttgccgatagctttgaaagcgagtgccagcgctttttcagaagagactttttggctgttatctgtttttgcagcagattgattgtgtaattcaccattgaccgcatagacattatcggatttatcgacgtgaacgatcacttgcgaatctttaattggcactccgttaacgacaggcgcatatcgaaagtgcttgtatccaagggcatcagtcgtgctttcaacaagcttcagccttttggaaggatcacctttaaaaatgttgctgttctttttcaaaaactgcttgacagccttgtcatttggtgcagagagttctgattgcgcaatcgcatttttggagaggaaatttgtttgattctctttaagctgatgaccttcagcagcctgaacacctggcaggctgattgataaactcataaacgaagcagcgacagcaacagacaatttcttacctaaacccacaataaatccccctttttgaaaatactgaaaactttatattgttatattaaactagcattctggaatactcaacaaaaactaacataactagacaaaattgatagtattgtcctgtgtttgtttttgttgaataatatcaagatgagtcaagtgtcatgtggtggttcattcaagagttatgttttttacatatcaaggggaagatgagatatttttgtttcatcttgaaactttttgaaaagtccgctgtctaaccgaatgaggccttaataagaagtaaaggattgttgttcgtgttggagttattcagtcattatgtattgcatttcgaacgttattttatattaagcagacaaagcaccctgctgattcaatggtcaattgttgttctggcgggtttatatcttttggggcatcatcccaaaataaaccggcagcgcacaatgttcatggcgggtgttatattgcggattgtgctgctggcgggagtgtctgttgaacttattcaccaagtgcaatcaacaaacttcaccagcgcttacttaagagaggacggaaatgaactgctgccgctgctgcattttttgttatacggatatgtgctgctaacggcttttcactatatgctgatgccgcgtgatcatggcggaaagggtaagttttatacgttcgaccttgccgttgtcagtttgccaatcgtacaaatgatttttagtttcttttcgtattggaaggaatacccggatgggatggagccgattgcattcgtgtttctgtttttcatcatcactcttcccattgcgttgaatgtagtgtttttcaagctgcattggagaacggataagatcttactaggcttattttatacgctgattatcggactgcttgtcttgctgcttgtgccatatcccaatcaaatctcaaaagattatggtgcagtaatgccatatacgatttatttggcaatggcgggatttttgatgagctatcatctgttccaaaagtcaggaaaggtttatgtgcgtgtgaataagtgggtgacgatggctgtcctggtgttttttgtcctgctgttaaatccgatatataacataggaacggctgctttcgctgtatcaaagccagcaaatgtccatgattcattcaattttgtcggggagcacatttcatcagaaaaagcggaacagatactaaagtcattttttcctacggatgaaacactttatttgcacgatacaaacatggatgtgcattatttctactcatttgaaagcaaaggttacaaagctgaggtagatgaagtatcgcagctgattcgtaattatgaatacttacaaaaagcacatgggaaaaagctaacgaatcaggagtacaagcgaaagtccatcgctttccttgagcgacacggacgtgtgttacataaggatcatatcgaaacaaaggtatctcaagaagacggccagacagtcgtacgtatttacctgaaaaaccagcttcataaaaaagatcatgctgatgatggcgcggtattttattgggaaaaggaaaccttaatggggtttagtgaagatccttcgatttatcagcttgactctcttctgcatgttcatataacggaacaagacattcacgacaaagtggaacaaatgtttacagcgctgaacatatcaaaacagccttatcagatcactgatattgaaagcgacagcctgcttggaagcatggtgagagttgaaacaaaaggtggaattgttttggaatttgagggcgaatcaggttgtttacatagtctttcgcttccgatgaaaaagaatatctcaatggctaacagccggctgcagcatcagatattatcgatcttcgatgctcgtggatcagaaaagaagaaaaaaagcagtcagggtgacatggtgatgtatactgattcttctaaaacatatgagtttgttgaagctcaaggtcagctaaacgtttatgtatacagcgatacacctgatcagtcattcccctatacgtatcgtaatggaacattggcttacgaaaaagtagcttctctatatcaggatgtcatttacaaaaagcgtatgcgtccgattatcgttcaaagaggggatgaacggcattatgcatggctgatcattattcagccgtttggttcaaatcgccatgatgcctatgtagtggatggagaaacacaagaggtgaaaagtctttatgaatcataaagaaaaagagtctgtttttgtagacttatacgacctgtataaagaaggagagctagaggatgaatcaatggaatggatgaaacagcatgaatccctatttcaaaagaatgcggaagacttaaagagtaaaacttgtttaaagagaagtcccggtgctgaagaagaaagccaaatcagatatatgaaagtatacctgtcttccatgtatatctgtttcattttattggccatttggatgacggtgtggttttacttttaatgaagcatagggattccattgaggacttgtatcggcagtattatcaagaaattttaaattatttattcagaaggactcatcatcttgaaacagccaaggacttagcgcaggacacgtttgtgaaagctcttaatggtctggcttcgtttagggggcattcttccatcagaacatggctctacaccattgcgcatcatacctttatcaattggtaccgaagggatgtcaaataccaatttactgaaatcagcaaaaatgaagggttaacgcaaacaacttatgagcagcctgaacagtatctgtcacgaacggtgaaaagcgaaacactgcggcaggagctcctgaagttaaaagatcagcatcaatccgttttgattttaagagaattccaagagctttcttatgaagaaatcgctgagatattgggatggagtctttctaaggtgaaaaccacattgcaccgggctagattagaacttaagaaacacatgacgaaaagtagagaggaggagcggatatgacctgctttctagtaagagacctgcttcctctgtatcttgaaggtgattgtaaaagagaaacggaacacgttatagaagagcatttaaaaatgtgcagcagctgcagagacatgtatgacacgatggctgagccatttgaattggaaagcgaacaggccgttgaggaggcttatctgccggaagaagaactgcgttttaaacagaggtactatggattactgatcatgaaagctgcctgctggtttggagcggtggttgccatgatgctgatcatcaaactgctgatataaaaaaagcgcttgtccgattccggcaagcgcttttttacattaagcctggggatgaatcatatcgtaaatagcggcaagctgttcttgtgacagggcactgaagagtttttcataaacgtcagcttgcagtggcgttgcacctgcttgtagcgctgcgtctttatcatagctgtacacatcatcttgtagcacaatggctgcttgaagaatgtgaatcttgagagaaacagcggagaaaaattgttcaagtgcaagtgcttctttttctgtgaagccaagttcaattgctttttctgtatcaaatttgtaatttccatcctcgagatacacacattgtgaaacaatgctgaaaaattctgatgtcgattcccagagtgtagcaattacctgagcctcttcttttgtcattcctaactcgacagctttttcgctgtcaaaataatatacaccgtcttgttcgtaaatacattgatttaatatatcaatgaatgtattgagatcttcgttagtgctcgcctgatgctggagttgaacagcagtgttatcaaccggtgtttttgcgctggctgcatcagaaccgaacgttaatagagcagctgaggtcattgcggcagtcgttaacatagctttttttacaaatgttttcttcatgtttcttctctcccttttatgaattgtgctacaaattccattatagggagtagtttccggtgaaggaataggcgctatggtattttatgtgtatcgttgccgaactactttttgaaggctgcacgtgtgatcgttagaacgattgtctatgtatgaaggctgttttgcatcttcctgactaagaaacaggggagataaggcttaaagaaatgaaaaacaccgctttctttgcggtgttttttgattacaatgtcgccggcggggcaatgcttttaatcaagcaagccttgttcgcgcattttcttttttaatgtaaatccgccgcccatgacagcgcaaacaagtacaatgctggcgataatgcctgcagggcttttttcagcgataaagacgccgatcagcataatgctgaaaaccgctgcaaatgcaaataatagtaaaagccaattcatttttttcataaattccatccccttttacgtcttatattaagtttacagaaaaacgtgacgcttttaaagaggatgtgtgatataatatgaaagttatctaatttttttaggagatgaaaaagtgaaacttcgaaatgatcttcgcaacatcgcgattattgcccacgttgaccatgggaaaacgactctagtcgatcagcttttacatcaggctggtacgttccgtgccaacgaacaggttgctgaacgcgcaatggactctaatgatcttgaacgcgaacgcggcattacaatattggcgaaaaatactgcgattaactataaagatacacgtatcaatattttggacacccctggacacgcagactttgggggagaagtagaacggattatgaaaatggttgacggcgtagtgcttgtcgttgacgcatatgaaggctgtatgcctcaaactcgttttgttctgaaaaaagctcttgagcaaaacctgaaccctgttgttgttgtaaacaaaattgaccgtgactttgctcgtccagaggaagttatcgatgaagttctggatctgttcattgagcttgatgccaatgaagagcagctcgagttcccagtggtatatgcttccgcgattaatggaacagcgagtcttgatccgaaacaacaggatgaaaacatggaagctttatatgaaaccattattaagcatgttccggcacctgttgataatgcagaggagccgcttcaattccaagttgcccttcttgactacaacgactatgtaggccgtatcggaatcggacgcgtattccgcggcacaatgaaagtcggacagcaggtttctcttatgaagcttgacggaacggcaaagtcattccgtgttacaaagatttttggtttccaaggcttaaagcgtgtggaaattgaagaagcaaaagcgggagacctagttgcggtttccgggatggaagatatcaacgttggtgaaacagtatgtcctgtagaccatcaagatccgcttccggtgcttcgcattgatgagccgacacttcaaatgacatttgtcgtgaataacagtccgtttgcaggccgtgaaggcaaatatgtaacggcccgcaaaatcgaagagcgtcttcaatcacagcttcagacggatgtgagcttgcgtgttgagccaactgcttctcctgatgcttgggttgtttcaggacgcggtgagctgcacttgtcaattttaattgaaaatatgcgtcgtgagggctatgagcttcaagtgtcaaaacctgaagttattatcaaagaaatcgacggcgtacgctgtgagcctgttgaacgtgtgcaaattgatgttcctgaagagcatactggctctgtcatggaatcaatgggtgcccgcaaaggcgaaatggttgatatgatcaacaacggaaacggccaagtccgtctcatctttacagttccttcccgcggattgatcggttactctacagaattcctatcattaacacgcggattcggtattttgaaccatacgtttgacagctaccagccgatgcaggcgggtcaagtcggcggacgccgtcaaggtgtacttgtgtcaatggaaaacggaaaagcaacatcatacggtattcaaggaattgaagaccgcggtgtcatcttcgttgagccgggtactgaagtatacgaaggaatgatcgttggagagcataaccgtgacaatgaccttgttgttaacgtcagcaaaatgaaacagcaaacaaacgtccgttccgcgacaaaggatcagacaactacaattaaaaaagcgcgcatcatgtctcttgaggagtctctagagtacttaaacgaagatgaatattgtgaagtaacacctgaatccatccgtttaagaaagaagatcctcaataagaacgaacgtgaaaaagcagctaaaaagaaaaaaacagcaggattgtcttaatctcgtgcagaatttgaaaagatagaacccgtacgtttacaggggagggaatctttttgaatgacgtaagcgaacgtctgtcgttcttcgccgctctatatcaagtagaccggcagcctgcggcaggcatgtggctgctgtacggcacgatttttgtgttggccgttattgtatttaagcttggatttgctaaacggcttcctgtattaaaatctgcagtggtgtatgtatttttggcgttgggctgcactgttttgacttttttaggggtgtttttgcccgtggcagaaggattggtcgtcgctgcgctgattttaatcacttacaaaatccggctgtatcagtcgaaaaaaggacagtctgcaaaatcataaaagactcagctgaaagctgagtcttttttgtgttctgtatggttaagcggccgctttattttttgactttttcttttttctgctgtcccgggtgaaaagtaaattttcccgttttcagccgttcctctgtttttttggcaatccgatcgtgacattcctggcacatatatgtatggatcgggcggtttcgaagccgtttcgcgatcagggtatcatcatcaattgtttcaattttatcgcaaatagaacatttgaccctcatcatatcacctctttcactaacatgtattatagcacggatcagaagctgtccaaaataagaaaaagctaaagcgcaaggctatagcttagtcattgttgttctttttcatatgatgatcagattgatcgttttgctccttctccatttcctgctgctgttttctatttaattggtcattttgctgctttgtttgcggttcgtcttcattgtcaatcacgtcgttaggcacttcgggaagcactcggccgacaattgcagctaattcatccagtatgcctgttaccggatggccctcgctgatttctctgctcatttcacgaaggcggctgaccgtatcgggatcagcaatgaccactgcgtttgcgccatatcgatcattctttagcgcctgagctacagaatatttaatggtttccactttgcttctgtccaaagtatcatcgacatcaatcccaacaacagcatagcctcccagcacaacggctgttgcatccttgacgtcggggtttttttcagcaacgctgacaagatgcttggcaatatcggttcttgttccattgtcttttgtttcttgagttgtgtcctttacgtgaatcggtttagtctcctgctgtcttgttgattctttttcaacattctgaccctgttttccttgttgataggcacaagcggacaggataagtgtcagctgtatgataatgaaaagaattcgcacttgcgggttccctccttaaaatgctttcattaattttattgttgaattaaccttctatctttatgcacaaaaacatatattttagcaggcattcacctttttcatcaaaagagaagcaggaagaactttgacccttatatcaggaggctgagacttgagtaaaatttatgtgttagatacgaatgtgttgttacaggatcctaacgcaatattttcttttgaagaaaatgaggttgtcatccctgctgtcgttttagaagaggttgattcaaaaaaacggtatatggacgaagttgggaggaatgcaaggcacgtatctaagctaatcgatgcgctaagacaaaagggcaggctgcatgagcatgtaccgcttgacaccggcggcacactgagaattgaactgaatcatcgttcgtttcaccagctgcaagagatctttattgaaaagacgaacgataatcgcatattagccgttgcgaaaaacttaagcctcgaggaagaaaccaaggaaaatggcaggccggttatcctcgtcagtaaggatgtactggtcagggttaaagccgacgcaatcggactgcttgctgaagatttcttgaatgaccgggttgtggacaatgatgaaatgtacagcggctataaagatttatatatcagccagcagctgttcagctctttttacggaaaaaatcaaatttcagtaaacgatgtgaaacagcatgcgttttatccgaatcagtttgctttaatgaaggatgagctaggaggatcctcctcggcagtcggaattgcagataaaaccggaacggtattaaaaagactcgtatttgatgatgaacatatatggggaatcaggccgaaaaatgtacagcagacaatggcattagagcttttgctgcgggaagatattccgcttgtcaccctgatcggcaaagcgggaaccggcaaaacgctcttagctttggcggcagggctattacagacagaagacttgggaatatataaaaagctggtcgtcgcaaggccgattgttcctgttggcaaggacatcgggtatttgccaggcgaaaaagaggaaaagctaaagccttggatgcagccgatttttgacaacttagagtttctgtttaatgcgaaaaaaccgggggagcttgatgctattttggcgggaattggctcaattcaggtagaggcgctgacttatatcagagggagaagcattccagatcaatttattatcattgatgaagcgcaaaatttgaccaggcatgaggtgaaaactttgctgacgagagtcggtgagggcagtaaaattgtcttaatgggtgaccctgaacaaattgatcacccatatttagacagtctgaacaatggtttagcctatgtggttgagcggtttaaaggacaacccatctcaggcagcgtgaagctgttaaaaggtgagagatcaggtctcgcccagctcgcagctgatttgctgtaacattaaatgatttcgatctcttttacgtcggtaatcggctgtttgtgatgaaccgggtcttcaaagtaaatatgcacggggccgccttcttgaatcggcttgcctgcctcactgaaatggacaatactgttcagagcggtttccagagaaacggcggcctttcccgaacttgtgacaaatacacattgcgtcgcagagctgttcggctcagcatttttcaggacagtcccaagtctcattgcgaaactgccgttcatcagtttttgcttctcatattgcttttccgtctttaatgtaggcggcgcaattcgcccctctctgatgacgcgttccggatcaaggtcggattcatccccggctgattgtaaatatatgtcttgactgtcccctttgcggtcaaacgaaaatttgcgatcatcaaaaatccatacgcttggatcaatggtaattgggtatgtaacattgccttttacttggataacgctcatgatatgacccccttctctcaaaattataaaagttttcgcatgaattgtcactttgtgtacaaattatgtgtattgaaatgctgagggaacgagggtgtttgcatggtatgccggcataatgatgagcttgaagccttagtgaaaaaggcgaaaaaagtaacggacaagggggagatagccagctatattcccgccttggcaaaagctgataaacacgacctgtcagtagcgatttattattccaataatgtttgtctgtcagcaggtgacgtagaaaaaacatttacgcttcaaagtatatcgaaagtcctttcccttgctttggtgttaatggaatacggcaaagataaggtcttcagttatgttggacaggagccgaccggtgatccgtttaactcaattatcaagctcgaaacggtgaatccgagcaagccgttaaaccctatgattaatgccggggcattggtagtgacaagtctgataagaggaagaacggtgaaagagagacttgattatttgctttcttttatcagaaggctgacaaacaaccaagagattacatactgccgggaagtggctgaatctgaatacagcacttcaatgattaatcgggcgatgtgttattatatgaagcagtacggcatttttgaagatgatgtagaggcagtaatggatttatacacgaagcaatgcgcgattgagatgaacagcttggatttagcgaaaatcggatctgtatttgcattgaacggcagacatccagagactggggagcaagtcatctcaaaagatgtcgctagaatttgcaaaacatttatggtgacgtgcggaatgtataatgcaagcggggaattcgcaattaaggtcggaattcctgcgaaaagcggcgtatccggcgggattatgggcatttcgccttacgatttcgggatcggcatattcggccccgcattagacgaaaaagggaacagcattgcaggtgtaaagcttttggaaataatgtctgagatgtacaggctgagtattttttaatttatgtcatatgcttaaatcctcttgcattttctgttgataccctttatgataaatagaagaattaggtactcgcctggggaacggagggatacttttggcttcagagatgatagttgaccatcggcaaaaagcttttgaactcttaaaagtggacgctgagaagattttgaagctgatccgagtacaaatggataacttaacgatgcctcaatgtcctctatatgaagaggttttagatactcaaatgttcgggctttcgagggaaatcgattttgctgtccgcctgggattggttgatgaaaaagacggtaaagaccttttatacacattggagcgcgaattgtctgctttgcatgacgcgtttacagctaaataaatgataaaactcaaacttattaacagtttgggtttttttataaccgctatttttctctcatctcataaaagacggtctttttttacacattccttccgaatcgtatagagattcttcgtctcgtttgataaattgtagtaaaataaaaaagataaatacataaaaaccatagataatggaagttagaagcagggaagaggatgttatgttaaaaaaaatgctaaaatcttatgattactcactgatattcgcaatcgttttattatgcggattcggtttagtgatggtatacagctcaagcatgattacggctgtctcccggtatggagtaagcagtaattttttcttcatgcggcagctgtttgctttaattgcgggtggcgctctatttattctcatggcgttgtttccttataaagcactggcccatcaaaagtttcagaaggggatactgcttgtatctgttcttgcgcttatctcactgtttgttttcgggcatgttgccggaaacgcgcagagctggtttaaaatcggcggaatgagtattcagccgggggagtttgtgaaactggtcgtgattttataccttgcagccgtatatgcaaaaaaacaaagttatatcgaccatctgttaacgggagtagcccctccggtagtcatgacgcttgtgatttgcgggttaattgccatgcagcctgatttcggtacagccatgattatagggttaattgcgacgtgcatgatcttgtgctccggtttcagcggaaagacgctggtgaggcttgtgatactgggcggaattgttttcattttagtcagcccgattatctatttgaatcaggacaaaattttaactgaaggccgtttagcgcgttttgagagtcttgaagacccatttaagtatgcaaattcatcaggtttgcaagtgatcaattcttattatgcgatcagctcaggcggcattttcggcctggggctcggtgaaagtatccaaaaatacggatatctgcctgaatcacacactgactttattatggctgtcattgctgaagagctcggcatttttggggtattgtttgtgattttcttattgggttttgtcgtcataaaaggtttttatattgccagaaaatgcgaggacccgtttggaagtcttctggcgatcggcatttcaagcatgattgccatccagtcgtttattaaccttggcggtgtcagcggattaattccgattacaggggttacgctgccatttatcagttacgggggctcttctttggtgctgcttctggggagtatggggatattagcgaatatcagcatgtttgtgaaatattcagagaataagaaaaagaaagagcccttggcgccgaagggaatgaaaaagaaacagctcaaaaaaactgtttatctgtaaaaaacaagtgtgtacaggggaaggatattccgctatgatagattatattccattcgggtaagggggagaaaagtttgtctcagcaatcgatacaaaaagtattagtagcaaacaggggagaaattgcaatccgaatattccgggcgtgtaccgagttgaatattcgtacagttgcggtctattcaaaagaagattccggttcctaccatcggtacaaagcggatgaagcatacttggtcggtgaagggaaaaaaccgattgatgcttacctggatattgaaggtatcattgatattgcgaaaagaaacaaagtcgatgcaattcatccgggatacggtttcttatctgaaaatattcattttgcgagacgatgtgaagaagaaggcatcgtattcatagggccaaaatccgagcatctcgatatgtttggtgacaaggtaaaagcgcgtgagcaggcagaaaaagcgggaatccccgtgattccgggaagcgacggtcctgccgaaacgcttgaagccgtcgaacaatttggacaagctaacggttatccgatcatcattaaagcctcgcttggcggcggcggccgcggtatgcggattgtcagatctgaaagtgaagtcaaagaagcatatgagcgtgctaaatcagaggcgaaagcagcctttggcaatgatgaagtttatgtagaaaaattaattgagaatccgaaacatattgaggttcaggtcattggagacaagcagggaaatgtcgtccatctttttgagagggattgttccgttcaaagacgccatcaaaaggtcattgaagtggcgccgagtgtctcgctgtcacctgaattaagggatcaaatttgtgaggcggcagttgcgcttgctaaaaatgtaaactatataaatgcggggacggtagaattccttgttgcaaacaacgagttctactttattgaagtaaatcctcgcgtacaagttgaacacacgataacagaaatgattactggtgtcgatattgttcaaactcagatccttgttgcccaagggcacagccttcacagcaaaaaagtaaatattcctgagcaaaaggacatttttacaatcggctatgccattcagtcacgggttacgactgaggatccgcaaaatgatttcatgcctgatacaggaaaaatcatggcttaccgctcaggcggcggttttggtgtccgtcttgataccggaaacagcttccagggcgccgtgatcacaccatactatgattcacttctcgttaagctttcaacttgggctttaacgtttgaacaggcagctgccaaaatggtacgaaaccttcaggagtttagaatcagaggcataaaaacgaacattccgttccttgagaacgttgcaaagcatgagaagttcctgacagggcaatatgatacgtctttcattgatacaactcctgaattatttaaattccctaaacaaaaagaccgcggaacgaaaatgctcacttacatcggcaatgtgacagtgaacggcttccccggaatcgggaaaaaagaaaaactggcgtttgacaaaccgttaagcgtaaaggtagacgttgatcagcagcctgccagaggaacaaagcaaattcttgatgaaaaaggtgcagaagggcttgcaaattgggttaaggagcagaaatctgtccttttaactgatacgacattcagagatgcccaccaatcgttattggcaactagaatcagatcgcatgatttgaaaaaaatcgcaaatccgacggctgcgttatggcctgaactattcagtatggaaatgtggggaggcgcgaccttcgatgtagcctaccgattcctgaaagaagatccgtggaagcgtttggaagatcttcgcaaagaagtgccgaataccttattccagatgctgcttcgctcatcaaatgcggtcggctatacgaattatccggacaatgtgattaaagaatttgtgaagcaatcagctcaatccggtattgatgtgtttcgtattttcgacagcttaaactgggtaaaagggatgacgttagccattgatgctgttagggataccggcaaagtggcagaagctgcgatttgttatacgggagatatccttgacaagaaccggacgaagtacgaccttgcatattatacatcgatggcgaaggagcttgaggcggccggagcccatattctcgggattaaagatatggcagggctgttaaaaccgcaggctgcatatgaactcgtttctgcgttgaaagaaacgatcgacattccggttcaccttcatacgcatgatacgagcggaaacggtatttatatgtatgcgaaagctgttgaagccggcgttgatatcatagacgtggcggtcagctcaatggcgggattaacgtcacagcctagcgcgagcggattttatcatgcgatggaaggcaacgaccgccgtccggaaatgaatgtccaaggcgttgaattgctgtcccaatattgggagtcggtgcgtaaatattatagtgaatttgaaagcggaatgaagtctccgcatactgaaatttatgaacacgaaatgccagggggccaatacagcaacctgcagcagcaggccaagggagtaggccttggcgaccgatggaacgaagtcaaggaaatgtacagacgcgtgaacgatatgttcggtgacatcgtcaaggtaacgccttcctcaaaagttgtcggagatatggcactttacatggtgcaaaacaatctgactgaaaaagacgtttacgaaaaaggcgaatctttagatttccctgattctgtcgtggagcttttcaaaggaaatatcggccagcctcatggcggattcccggaaaaactgcaaaagctaatcttaaaagggcaggagccgattacagtcagaccgggcgaactgcttgagccggtgtcatttgaagcgatcaaacaggaatttaaagagcagcataacttggaaatttcagatcaggatgctgtggcatatgccctttatcctaaagtcttcactgattatgtgaaaacgacagaaagctatggagacatctcggtattagatacaccgacattcttctacggcatgacattaggtgaagagatagaagttgaaattgagcgcggcaaaacgctgatcgttaagctgatttcaatcggtgagcctcagcctgatgccacccgcgtcgtttatttcgaactcaacgggcagccgcgtgaagtagtcattaaagatgaaagcattaagtcttccgttcaggaaaggctgaaagcagaccggacaaatccaagccacatcgcagcttccatgcctggaacagttattaaggtattggctgaagcaggcacaaaagtcaataaaggtgatcatttgatgattaatgaagcgatgaaaatggaaacaacggttcaggcgcctttctcaggaacaatcaagcaggttcatgtgaaaaatggtgagccgatccaaacgggagatctgctccttgaaattgaaaaagcataataaacaaagagtgtatatcatttgatatacactcttgtttttttatatagaaaatgtggagtgaaacagatggttagaagagatataaggggacttcagagattatacaatactgtcacaagcccaaaataaatagaggcttatacagccaatattttagatgctttgtagtatgccgtgcatatttctttaagcactatctgatttaaaaggctttaatacttatgttcgcgggctatagatgcatatgaaatttctataatcacgatgagaaaggggacagcccgaagtgagccgctcactgatcatcaagttcagcgaaggctggcgattgaaacaataaagcgccaaaacaagacctgaaaaaagaccaaagccgcctaaggctttggtctttagtccttatgattgactagattcgtaacggaaacgagcaatcaataataagaagtagcatagaacgccaaacagacaggcaataaagaacgagtgggcaagtgcaaagcccagagccagttcagagtatacgatcataatcccggacagtgcctgtaatgtaatgaaaataagacatgagatccatccccaaaagatctgtttttgatctttataggagataatagcatgaacagcggcaacaataatccatacaaataacagtaaggctgctgctctgtggcccatttgcacccattcatggaattgggtcggaagcccattgttcagcgggctgcacagcggcacatcaggacatgccagacttgattcagtgtgtcttacatatgcgcctgtatacacaacgatataggaatatattaaaattcctatcatgtgaaattgcatctttttgccgatttgaagcggcttaaccagtgttctgactgatttatcagcttcaaatatgagcaatgttaaaataagcactgaagcaaaagaaattaatgagatgccgaagtgaagcgccataatcagcgcgttcgaaccgaatacgacagccaatgcgccaagcaatgcctgaagaaataaaaagataattgacatgatcgcgagaaacgttgtttcacgaaaaatcggcgtgatttttctccatgaccaaaacgcaaggcttaacacaaggacaatagagattccgcttgcgaatcggtggctccattcaataattgaagccggattcagttcagggaaaaaacggccgtgacacagcggccactgtctgccgcatccttggccggaacctgtttttgtaacgagggcacccccgattaaaacaattagcatgacaaatgtcgtcagaacaccgagagcttttaatgctttattcatacaatattcaccttcttaacatactgctgcaattttatatacgttccaagtgtaagcgaatatgtgttttgtggcaattcccagagccttttgttcacaaaaatataatagaatgacggcttctggaaaatgtacacttgattattcatgccgggtctgatagaaataaggtaaacgcaatgccgatttggagattgccttcatctttggtaaaattcataaaaagttcacaaataaattcctgtttgtcgtttaatatttaataggatgtttttttacaagatgttatcttgtatgatagagttgcaggttattttattctcctgcgttaggtttgtaagggaggtttacgttatggctaactccagaatcttaaatgatacagctatagacggacaaattgaagaaacaacggcatggaaagattttctgtcccttattaaaatagggatcgtcaattctaacctcatcacgactttcactggaatgtggcttgcactgcatatatccggtttaagttttttaggcaatataaacaccgttcttcttacgttaatcgggtcttcactgattattgcgggctcctgcgcgatcaataactggtatgaccgggacattgaccatcttatggagcgtacgaaagtaagaccgacggttacgggtaaaattcagccgagtcaggcgttatggtctggaattttgctggttgctttaggattgatcatgctgctgatgacaactgtcatggctgctgttatcggttttatcggagtctttacgtatgttgtattgtacacaatgtggacgaaacgccgctatacgattaacacagtagtaggaagcgtttccggtgcagtgccgccgcttattggatggacggcagtggaagggaatatcggtgtcgtagcatgggtgttattcatgattttatttatttggcagattcctcacttcttagcattggctattaagaaaacagaggattacagagctgcaaatattccgatgcttcctgtcgtatacggatttgaagtgacaaaaagacaaattattgtgtgggttgcgtgcctgatgccgcttccgtttttccttggtagcctgggtcttccgattgtcattctcggcttgctgttaaatatcggctggctgattcttggcttaatgggattccgctccaagaatatcatgaagtgggcaacacaaatgttcgtttactcgcttaactacatgacaatctatttcgttgccatggttgtcttgacgcttttctaaaaaatagatatgatgcttgttttatcgcttcaaaataaacgatgacaactagtaaatgccgccttgacctcttgtttaatcaggcggctttacttttatacatagatggcattttgagtaaaaaaactcataatttaagagaagaggaaatgtaagtgctttattggtgataggttggatggcgatagatttcgatccgctttccgcctttgtattgaccagaaaaggggttgggtgaaatggtaaagcattggcgtcttattttattattagccttagtgccgcttctattaagcggatgtggaaaaccttttttatccacgctcaagcctgctggcgaggtggctgataaacagtatgacctgacagtgctcagcacattgattatggtggttgttgttgcagtagtatctgttatcttcttttatgtgattgtgagattcagaagatcacgggtcggtgagaacacgataccgaaacaggtagaggggaataaatttttagaaatcacatggaccgtgatcccgattttgctgctcattattcttgtgattcctgttgtattatatacgctggagctagcggacacatcaccaatggataaaaaaggccgcaaagctgaggatgctcttgtagtcaatgttagggcaaatttatactggtgggagtttgagtaccctgattacggcattatcacaagccaggagctgattgtaccgacagatcagcgtgtatattttaatttaaaagcctctgatgtaaaacattccttctggattccttcagttggaggaaaacttgatacgaatacggataatgaaaataagttcttcctgacatttgattcaaaacgaagcaaagaggcaggagatatgttttttgggaagtgtgcagagctttgcggcccttcacatgcgctgatggattttaaggtgaagacgatgtctgcaaaagaatttcagggctggacaaaagaaatgaagaactataagtctacagcagagagcgatttggctaagcagggtgaagaactgtttaaagagaaaaactgcctgagctgccatgcggtagagccgaatgataagcgtgcagaagccgctagaacggcacctaacttggcgaccttcggtgaaaggacaaaagtggcaggggtgaaagaggccaacaaagaaaatgtgaaggcttggctgaaggaccctgacagtataaagccggggaacaaaatgacaggcacatatccaaagctctcagacagcgaaacagatgcgctttatgaatacttaaaaggcttaaaagcggaaagcaagtagggaagaaagggagatattgggggaggtcacatatgttgaatgcgcttacagaaaagcggacgcgcggatctatgctttgggattatttgacgacggtggaccataaaaaaatcgcgattctttatttagtggcagggggattcttctttcttgtcgggggaattgaagcgatgtttatcagaattcagcttgcaaagccggaaaatgcgtttctcagtgctcaagcgtacaatgaagtaatgactatgcacggaacgacgatgatctttctggctgcgatgccgctcttatttgccttgatgaatgcggttgtgcctttgcagatcggggctcgggacgtttcgtttccatttttaaacgcgcttggtttttggctcttctttttcgggggcattttcttaaatctaagctggtttttgggcggagcgccagatgcgggctggacatcatatgcctcactttcgcttcattctaaagggcacggcatagactttttcgtcctcggactccaaatatcggggctcgggacgctgatagccgggattaactttttggccacgattatcaacatgagggctccgggcatgacgtatatgaggctgcctttgtttacatggacgacatttgtggcctcggcattgattttgttcgcgtttccgccgcttacggttggattggctctcatgatgctggatcggctgttcggaaccaatttctttaatccggagcttggcggaaatacggtcatttgggaacatttattttggatttttggccacccggaggtttatatcctaattttgcctgcattcggtattttttctgaggtcatccctgtgttcgccagaaagcgtttgtttggctattcttcaatggtttttgcaatcgtgctcattggctttctgggctttatggtttgggtgcaccacatgttcacgactggtctcggcccgattgcaaatgcgatttttgcggttgcaacaatggctatcgcgattccgaccgggattaagatttttaactggctgttgacgatttggggaggaaatgtgaagtatacaaccgctatgctgtatgctgtctcatttattccatcctttgtgctcggcggtgtgacgggagtcatgctggcagctgctgcggctgattatcagtttcatgatacgtattttgtggttgcgcacttccactacgtcattattggcggcgttgtattcggccttttagccggtgttcatttctggtggccgaaaatgttcggtaaaattctgcatgaaacgatggggaaaatttcatttgtattgttttttatcggctttcacctcacgtttttcattcagcattttgtcggcttaatggggatgccgcgccgggtttatacgtttttgccaggacagggtctggaaaccggcaacttgatcagtacaatcggggcgttttttatggcggcagctgttattcttctgctggtcaatgtcatatggacatcggtaaaaggtgaatatgtaggtgctgatccatggcatgacggacgtacgctggaatggaccgtttcttcaccgccgccggagtataactttaaacagcttccttttgtcagaggacttgatccgctttggatcgagaagcaggcagggcacaaatcaatgacgccggcggaaccggttgatgatattcatatgccaaacggctcaatcctgccgctcatcatttccttcggcctttttgttgcagcgttcgggctgctgtacagaagtgattacgcttggggtctgccggtgatctttatcgggctcggcatcacatttattacgatgctgcttcgttcagtaattgatgatcacggctatcatattcataaagaggaactgccgaacgatgataaaggggtgaaggcataatgcaagttcaagaaaaattcaccgcagaaacctttccagcttctcctgaaaaagtaaccctggaagggaaaaataaatttttaggcttttggctttttcttggcggagagactgttctgtttgcgtctctcttcgccacgtttcttgcgcttcggaattcaaatgccggtgatccgcctacgacggaaatgttcgatgtgacacttgtattcattgccacaatgcttctattaacgagcagtttaacgagtgtgtacgcgatgtaccacatgaagaacttttccttcggcaagatgcagctttggctgggaattacgattttattgggggcgggctttttaggactggaaatctatgagttcaagcattacacccatgaatttggctttactatcacaagctctgcccttggttctgcgttttacacgcttgtcggtacacacggcgcccacgtggcatttgggcttatgtggatcagcacgcttatgatccgcaatgccaagagagggctgaatctgtatacggcgcctaagttttacgttgccagcctttattggcactttattgatgtcgtgtgggtcttcatctttaccgttgtatatttaatggggatggtgggataaacatggtcgataaaaaaagcagagggcatatcaatagcgaccttgaatttaagaaaaaaaagcatgcccgggagatgaaatatcaagtcctgtcttttggtttaatgatcggtcttacgattgttgcatttctgactgtggccacggacggtgtcggcagctggtttacgattcctttcattattttgctagctgcaattcaagtcatctttcagctgtattatttcatgcatatgaatcagaaagggcatgaggcgccggcactgtttttgtattcaggggtgtttgtcgcgtttatcactgtgcttgcgtttgtgacaattatatggtggtaatttgaacagccgccggaggtgaagaaatgaatcagttggagatatttgggtttcgcgcgatgtggagcccttatcttttttgtatcctgttaggcattacggcgctttatctctatttttacaggcgaatgtcttcaaagccgaatcgaataactggtaaagagatggtgtgctttctgtcggcgatgctgtttttatatgcagccgagggaagcccggttgatctgctcggacatattatgttcagtgcgcatatggtgcagatggccgtcctgtatttggttgtcccgccgcttttgatcgcgggaattcctgcatggctctgggaaaaaatcattttcaggccttcaatcaaaccggttttttcctttttttcgacgcctttaattgctttgcttttgtttaacggcattttttctttatatcatgtaccgcttatatttgatactgtcaaaaccgatccattttaccatacattaatcacttggcttatctttgtgcttgcgttcttcatgtggtggccgcttgttcataaggttgagcgtctacggcagctcagcggcttgatgaagctgggttatattatggcggacggtatgctactcacacctgcttgcgccttgatcatgttcagcggtgcaccgttatacgccacctatacagatccggctttatgggctgaggcaatgaggctttgcgtgccagcggatatgatggggcaggtcccattaacagggccagagatgttgaatacactgcctttgttagaggatcagcagctcggagcagtcatgatgaaaatcattcaggaaattgtgtacggtacttttttggccgttatttttttccaatgggtgaagaaagaaagggaaaaggacgggcaggaggagccgccgtatattcagcagacgatatcataaaaggtacagcgaaatatgctgtaccttttcgttacatttgaactgtttttaacatgttggctatgtcctgaatcagtgccttgctttttgtcacaacctgtacgggaaactcttccgtttctccatattctactccatgcgggtagtaatgctttcctaggagaggggacattaattgaatcacggcgcgcccgcttccgacatcgccttctgccgcaataccttgtatccgcaggtaaaacgtaccctcaatcgtcgaaaacttcttgtcataggtgactctctcgtaatcccattgacccgctctaatgagacctttgctttccattaagtcgtctagccagctgagctcagccttaaccccttcaagtccgctttcagtaaacttcaacactgacccctccttataaaaattacctttcctgacaatcatagtatgaaagcgttaaactttcaatgaatcttcttcttttgaaagtatgcaaaaattaaattttgacgacaatagcactagactaaaggaggttaaacggatgacaaaaataaaagatctgatgacagccgacttgcaatattgcacggtattagataatgtatatgaagctgcagtaaagatgaaggacgcaaatgtaggagcgattccggtagttgatgaggacggggaaacattggtcggcatcgtaaccgaccgcgatctcgtattaagaggaatcgccatcaaaaaaccgaactcgcaaaaaatcactgacgcgatgactgaaaaacctgtcagtgtggaggaagatgcttcagtcgatgaggttcttcatttgatggcatcgcatcagctcagaaggataccagttacaaaaaataaaaaactgactggaattgtcacgcttggtgatctttctttatctgagcaaacgaatgaacgtgccggcagcgccttatcggatatttccgaaggtgataatagagaagaaggcttttttcattaacacataaatctttgacatgttaaataggctgtattgtaatgggatgtaaacaagagattgtgaatcgccacgggggtgatagattgaaaaatatattgagagcaatggttatccttttgattatctgcggaacttatgttctgtttattcaatatggatctgttcctgaaaagaaatcaaatgacagcgagcctcaggtgtcgaatgaggaagcgcaaagcggcaaacgaatacatatgccgacttcagggttattgtccttcatgggcaagcccgccgatgaagtaacgaaaaagcttggggaacctgaacgtattgacccttcggcttatgattacgattggtgggtatacaatcaaggtaaggatcaatatatccaaatcggggtattaaacaataaagtggtcacattattcgcgtcgggtaatgatattaacgccaagcctttcaaaattggagaatcaactggcgaagtatttaagaccacccaggtggcaccatttgtgaatgtagagtataaaggaaattcctatcggtttgaattttctgaagaagatatcaatacaagaccgactgtaaaggtaggaaagatgtatgtccagctgtatatggacaaatttgaggggaagctatccagcattagggcgtttgatgcgcaaacctttgtaaagcaaagaccttatgaggtagtgtaccgcggggaattaattaaaccgaaagccgtttcagatgagaaatggaaaaagatccaaacaacgagcgaaaagcaaatccttgatttgacgaatgtcatacgcgttaaacatggacttgcgaagcttgaatgggatcagccaacggcggaggtggcgtttggacatagtgaggatatgaaggaaaataattatttctcccatgtctctaaaaaatacggctcgctgaaagaccgcttagaagaagggcatgttgactttcagcaagcgggagaaaatatcgcatacaattatgtggacggtccggccgctgtagaaggctggctgaatagcgaaggccatcgaaaagcgttgctgaattcagattatacgcatcttggtgtcggagtagaccggaaatattacacccaaaattttattaagcgatggtaatgaaagccgcggacgaatggttcccggctttttctatttccatacaagctggtctgaatgaatgtgctgatagcttacagataaggccgtttcccattccttcagtcaggctttttcaccagtgtatagggatatcgctaaaaattcatttgggaatgaatataggcgaacacaatgcccgacaaaacgatacattgtagtaggtaacgattttcggagggggtgaggattgtggcgaatcaacatgccaatcattcaatcaatgactttaaacaattcgtcaaaaagcatcccaagctgataaaagaagtgcgcaaagaacaaagaagctggcaggacgtatatgaaaattgggtcctcttcggggagagcgacccgatttgggatccgtatcgggaaccggaagaagcttctgaagctgtgcctgaaacaccgcaaaaaaatgattttgtctcgaaaatggtgacagcggtgaaaaagatggatgtcaatcaaatgaacgaacaaatcaataaaatgagccagtcgatctcatcgttgcaaagccttcttaatacattttccggaagcggacagaagcattctcagccaggctctggacagcatcctttttcttttcgaaaggattaaaaaaggggagctcatatgcgcaaagaggttcaggaatatattttagcaaacgaagaacggaaacgattcatcagagaacagccgatatggtaccgcaggctttcaagaaaaccggatgatctgtcctcctttcagcttgaaatgatgaatttttatgaaaaaaccattccgcatcgggtgaatcagtttacgaacgggattcaaatggcgcaaatgatgatgcaaatgtttcaagcgatgcggacaaaagattaaaaggccccgaaaaagggtcttttttcatgcggacataaggttttgtatacggctgcggttaagcattttccaattggctggtttcatggtaaactaacaactggaggtgcatgttatgtatgcgacgatggaatccgtgcggcttcaaagtgaagctcagcagcttgccgagatgattctgcagtcggagacggctgagaactaccgcaattgttacaagcgtctccaggaagatgaagaggcaggtcggattattcgttcttttatcaaaataaaagagcagtatgaggatgtacagcgttttggcaaatatcatcctgactatagagaaatatcccggaaaatgagggagatcaaacgtgagctggacctgaacgataaggtggctgacttcaagagagctgaaaatgagctccagtccattcttgatgaggtcagcgttgagattgggacagctgtttcggagcatgtgaaagttccgactgggaacccttattttgacggtttgtcttcatgcggaggcggctgcagttcaggcggaagctgcggatgtaaagtgtcctgacgagactggccgtctcgtcttttacatataagagaaaacaggcaggtgattgtattggagaataggcgccagggcatggttgtgtatctgcactccctaaagcagagcaaaatgctgaggaagttcgggaatgtgcactatgtatcaaaacgattaaaatatgtcgtactgtactgtgatatgaaccaaattgaaaaaacaatggacaagattgcgtcttactcatttgtgaaaaaagtggagccttcttataaaccgtttttaaaattggaattcgagtcaaagcttgataaggcaaaagaatacgattataaaatcggcatatagctataaaaaaatccccgcaggcatctgcggggtccttctattccttaatatgttaaggagaaggcaaagggagaggagaaaccggaggaagaacttatggggaaacgtaagtcttctccgcggttggcaacaacatcctctagatgctgttgcttatagtatggacaaggatcatgctgcctatacacctgtttatcaagattagcgttcattgtttggaagaatgctttatgttaagataggattgatttttttctatgtacatagcggcgtccggccgaataaagaaacaaaatagcttttagaaaaagtggtgtggaacatgagagtaatttctggatcaaaaaaaggccgttcactaaaggctgtacccggaacatcaacaagaccgacaaccgacaaagtgaaggaatccattttcaatatgatcggcccttattttgacgggggcatgggacttgacttattcgcagggagcggaggtcttggaatcgaagcgctttcacgcgggtttgagcattgtatattcgttgaccgtgattttaaagcgattcaaacggtaaaatctaatttgaaaacgctggagcttacaaaacatgcacaggtataccgcaatgatgcggaacgtgctttgcacgctgctgctaaaagagaaagcggctttcgcggaatttttctcgatccgccgtataaggaacaaaagctgaaagcacttttaacgctgattgacgaatatcaaatgctggaagaagacggctttatcgtcgctgagcatgacagagaggtcgagcttcccgaaaccgtaggagatcttgtgatgacaagaaaagaaacctatgggttaacaggtgtggcgatttataaaaagagggggtagtgaggtggcgagtatagctgtctgtcccggcagttttgatccggtgacctacgggcatctggacatcatcaaacgcggggcgcatatttttgaacaagtgtatgtatgtgtgctgaataattcttcaaaaaagcctttgttcagtgtggaagaacggtgtgagcttctgagagaagtgacaaaagacattccgaacataacagttgaaacatcgcaaggcctgttaattgattatgcaaaaagaaaaaatgcgaaagcgattttaagaggcttgagagctgtatctgattttgaatacgagatgcaggggacgtcagtaaaccgtgtgcttgatgaatccatcgagacattttttatgatgacaaacaatcaatattcgtttctaagttcaagcatcgtaaaagaagtggcgagatacaacggctcggtatcagagtttgtaccgccggaagtagagctggcgcttcagcaaaaattcagacaaggatgagggttttgactcatcctttttttgttccgtttgtcagtctgtaagaaaaaatgataatgtacgtaaacagcgcgcatagtgtgacagcaggtccgatctgcacaagcagattccagccatttataaaggccgttggcatgtcactgctgttaagagatttaaatacatactgatatggatcatgccatgccgtgtaaagaggtttccataaaagcatgacgaagacagcggcataaacgccctgcagcaaacgtgcgataaagaatggtttaaatctaatgtcggtttccgataaaatacctgccacctgagcttgtacggaaaagccgctaaacccaagaataaagctgacgataatggctttttgcagaagagaaacatctgtctcgctgacaagcttgctgcctaatgtaatttcaaacatccctgataaaagcggaatgtccaattgagtcggaagctgaaacaaagtcagtgctccttttgtgaaaacagacaaaacatcagtcagctggaccactgacaacagccgattgaagacagaaaataaaataataaagccgcctaccataagaagcgtttgaacagaagacgtcacggcgtcgcctaaaattttacctaagggccgtttttctgcaagtctggcggtatgaagagcgtgtaaagcatctttgactgaagggaaaggtatcgttttctttcttctgagatgctgctcttccttgcggccataggagcgcattgttaaaccgacggcaagattccccaaatagtgtgcagaagctaataaaatgcctagtgatgcgttttgaaagaaaccgacggcaacagcgccgaaaataaagagcgggtttgaagaattggtaaacgacgcgagccgttctgcctctactcttgaaatctgattttcctgccgcagacgggcagtgagttttgcgcccgctgggtttcctgatgccattcccatagcaagaacgaagccgccgacacccggcacgcgaaagatcggccgcataaaaggctcaagcaaaacaccgacaaaccgcacaatgccaaagccgattaagagttcggacagaataaaaaatggcagcaatgacggaaacacaacctcccaccacatagacagcccggttttagaggcttcgaatgaggcctgtggatgtgagatgacagtcgctgttaaaaaaagaaaaaacgaggcaatcaaaagtgtattaatcttcgacaagttcattcttacctccccgatgctaaaaatgcccaatgacatgtatatcatgataaaataatgtatgatgtaaaacggccaagcagtacctgtcctcttgattctttgtactaatatacgagcataggggttcagtttagaccatagaattcggtatacagggaattcaggcaggaggttaacgctttggccaaacctaaaatcgggttagcgttaggatcgggaggggccagagggcttgctcatctcggtgtgctttccagtttacataagcaccaaattgaagtggatatgattgcaggaagcagcatgggcgctttggtgggcagtttttatgccgccggacatgacgtggcaacgatgaaaaaagtagccaaagcctttaaacgaaggctttatgctgattatacggtgccgaagctcggttttttaaaaggtgaccgcgtcagacagcttgtgcatgcttatacattcggaaaaccgattgaagagctccaaatcccgctgggcattgttgcgtgtgatctacagacgggagaaaagattgtgttccgaaaaggatcagtgtcagatgcagtgagggccagcatcagcatcccgggtatctttattccgcagcggctggacggacgccttcttgtagacggcgcggtcgtcgatcgaattccggtttctgttgtgaaagacatgggagctgatattatcatcgcttcggatgtttccagggttcgaaaaactgaaacagcagtgcatatttttgatgtgattatgcaaagtatggatatactgcaaaatgaattagtgcggcatcaaacaattgccgcagatatcatgattcgcccttcccttgaaacatacagctcaagctcgtttgccaatattgaagaaatgatatcggcaggcgaagaggcgacaaaccgaatgatcagcaagataagaaaagaaatagagaattgggagggctcataatttgctacgtaaaaaacattttagctggatgctcgtcatcctcatactgatcgcctttttatcatttataaaacttccatactatattacaaaaccgggagaagcgacagagcttgcttcattgataaaagtggagggaggctacccggaaaaaggaagtctgtccttaatgactgttaaagtgggaccggctaatccgtttacatatgtgtgggcaaagatgcacccttattatgaaattgttcctgatgagagcattaaggaggaaggcgagtcagataaggagtatatgaaaagacagctccaaatgatgaaaagctcgcaagaaaatgcggttatagccgcctatcaaaaggcaggaaaaaaagtcagctattcctttaacggcatatacgcaagctctgttgtagaaaacatgccggcaaaagggaaaatagaagtcggtgataaaatcatcagcgcagacggcaaaaactatcagtctgctgaaaagctgattgattatatcagcagcaaaaaagcgggagataaagtcacgttaaagatcgaaagagaagaaaaagaaaagcgtgtcacccttacgttaaaacaatttcctgatgagccggatcgggcaggaatcggagtttcgctttatacagacagaaacgtgaaggtagagcctgatattgattttgaaatcgaaaatattggcggcccgtcagcagggttaatgatgtcccttgaaatctataatcagctgacaaaaccagacgaaacaaaaggctacgatattgcgggaacaggtaccattgatgttgacggaaaagtaggcccgatcggcggcattgatcaaaaagtcgtcgccgcagacaaagccggaaaagatattttcttcgcgccaaatcaaaacggcgccagcaattccgattataagaacgcagtaaaaacagcaaaagatattgattcaaatatgaagattgtgcctgttgataccatgcaggatgcgattgattatttgaataagctgaaagcgaaaagcacctgattctcaggtgctttttctatacatttaaaaagtgttgttcatcttcgtcatatcgaatcggtgcatgtccgtattcctgtaggtcaaactcagttctcagcggctcttctatcggcaggctgtaaatcctgcttgcttttacgtccagatcgagagctggatgggagaaagaggacagtttgctgacaagcggaacagacagtgcttttttcttttcggataaataagcctgtccttttttcgtcatgccgagaagcctgatatacggcgccttatcgttgtcaagcagcttttgcatatcctgtttttttgttctggttaaaatgtgtgtattcatccgctggagccttgtccacgtatagcgttttgttttcagcagttccataaattcctgataggagctggattttctgatcgaacgaataattctgtgctctaaaccttcctccacctcgtatacttgctgtaattcccgtgccgttacagttgaaaggctgtattttaagtaagaaaagtagctttcaggtgtatgccacaatccgaaagatttgcggtaagctgctaattcacgtgcagatgcagcagggagaaaacgaaggcaggcttcgagattctggccaatcatcgcttttctaatgcttgtggcacttgctatatggttttcgccttcagggagatcggcatcatgatagtccgaagagattcgtgccgtagtataaggtttcataggatatcccccggttagaatcgaggtcacatactggtatcccaaaatgttatttggttttgacaagtcaagtgcactttcagtatgcaaaatggagctgaaggcgatagccgccgctgctgggtaactggccccctttttaagttcttctttaattcggtcattcaatatatgtttatgctcatcaataagctgtgctgtttctaaaaaaggcttgatatccccattttcactcccgaaaaacagcgcctcacattcaagttcgttcaggatggaaacactgccgcgtgcaaaaatgtctgctttttgcacggcataaagataaggcagctcaatgacaagatcaactccgctttgcagcgccatttttgttcgggcccattttgatacaacagcgggctccccgcgctgtaaaaaatgcccgctcatgaccgcgacagccgtgtcacatccggtttgccgctttgctgtttgggcatgataaaggtgaccgttatgaaagggattatattcaaccaccaatccgacagctttcatattttttccgcctttcttgctatgtttaaaaacgtatggtacatttgcaaatgaaaactcttacgccttatttttgttttaagtgtatgcatagcatattccgctgtcaacgatacttcaatggcagcattatgctgtaaagaaaaaatattgacaaaaacaatcttaaaagctataatcatgtttgttgctttcctgaggtgatacaaatgaaatggacgatttatcagctgcatcaaatgccaaaacaaagttttgagtttgatgaaacagttgagttaaatgagctgacaaagctgaattctgacattcgccgcatttctcccgtccgggtgaagggcagagcggatatcaaatccaaacaggtttcgtttgattttacaatttcaggcgaaatgattttgccatgctcaagaacactcgttgatgtcccgtatccatttgaaatttcaacaaaagaactgtttatatttcatcacacggatgatatagaagatgatgacgttcacattgttgaggacgatactatcgacttaactccgatcgtgaaagaagaaattcttttagaaatccctatgcaaatcttttgtgaatctgaacaagaaaaaggagctgctcctcaagaaggaaaggattggcaagtcatttcggaagaagacaagaagaatcaagttgatccgagacttgcagccctcgaaaagctcttaaaacaagatgatgaatcttaactctttaaggaggtgggaataatggctgtaccttttagaagaacttctaaaatgaagaaaagattgcgccgtacacatttcaaacttaatgtacctggtatgacagaatgtccgtcatgcggagagatgaagttgtctcaccgtgtatgcaaagcatgcggatcatacaacggcaaagacataaatgtaaaaagtaactaataagaaaagcgcggggtgaaaagccctgcgctttttctttttctcttcctgtcagcttgcggaaaatttgtgagtgcaaatagtctatctaatctattaccggcatatgtatgagataaataagctgacatggagggagattgaatttgaccattacaagacaagatgcttggactcaggatgaggatttgctgctggcagaagtggtgcttcgtcatattcgagagggaggaacacagctttcagcctttgaggaggttggaagggcgctgaccagaaccgcggcagcctgtggtttcaggtggaactcgtatgtgagaaaacaataccagtcaggtatagagcttgcaaaaaagcaaaggaaagaactgagaaagcaaatcggtgttcattcggtcaatatgccgaattccatgaagcagactgcctcggcatcgtcagaaggaaaacgagatttgtccattcaggatgtcattcaatttctcgaacaattcaaagaagcaccgtctgcacaagaatttcagcttgaaagggaaaaattgaaggagcaaatccaatcgctgcaaaaagagcttgaggatttgcggagtgaaaatcagacattgcggaatcagctagagatgacagaagaggattacaaggcactgatcgatatcatggatcgggccagaaaaatggttgtttcgaaggaagacggaagaatgaaaaaagcggctcaagaaacgtaaagaaacgcctgaaatgaaccggccctatagtaagaataggccggttgttttgatttctatgcagactctcccggtgtcatttcatgatccatatcaggatgccagatgagcgggttttcccctttgtcccgcgccatatcatacttaacagttttaaagttcattttgttccaaaattccgctgatttcattctcggatttgtccggatcggcattttgaatgattttgcaaattcaaccaaggctctcccgtatcccctgttctggtagcccggaagaacctcaagcttccacagctccaaataatcctggcggttgtcaaaatagggattcgatttgccgttaacttgatacagactcattcgtgctacaagtttatcgccaaaataaatcccgtaaaaaggcgaagtgctgtcattttcaataatattatcctgaagttcttcaagcattgaaagctcctgaatgccgtattctttgaatttcttgaattcttccagcgttttatagttgataagcagacgttctacctttgtcaaacaaatctccccctttgttgtttctacatatattgtaaacgctttatttaaaaaatccaaatatttaaactttaattttaagcacatgggatctttgagaagtaatttcttcttacttctgctatgataatacgtaaatgctaaattgggtgtgacatcatgaaaattggaattatcggcggaggctccgtcggtcttttatgcgcctattatttgtcactttatcacgacgtgactgttgtgacgaggcggcaagaacaggcggcggccattcagtctgaaggaatccggctttataaaggcggggaggaattcagggctgattgcagtgcggacacgagtatcaattcggactttgacctgcttgtcgtgacagtgaagcagcatcagcttcaatctgttttttcgtcgcttgaacggatcgggaaaacgaatatattatttttgcaaaacggcatggggcatatccacgacctaaaagactggcacgttggccattccatttatgttggaatcgttgagcacggagctgtaagaaaatcggatacagctgttgatcatacaggcctaggtgcgataaaatggagcgcgttcgacgatgctgaaccagactggctgaacatcttgtttcagcataaccattcggattttccgatttattatgagacggattggtaccgtctgctgacgggcaagctgattgtaaatgcgtgtattaatcctttaactgcgttattgcaggtaaaaaatggagaactgctgacaacgccagcttatctggcttttatgaagctggtatttcaggaggcatgccgcattttaaaacttgaaaacgaagaaaaggcttgggagcgggttcaggccgtttgtgggcaaacgaaagagaatcgttcatccatgctggttgacgtcattggaggccggcagacggaagctgacgccattatcggatacttattgaaggaagcaagtcttcaaggtcttgatgcagtccacctagagtttttatatggcagcatcaaagcattggagcgaaatacaaacaaagtcttttgagctttttcggtaacatgctatactcatttcggatcactaactatttattggagaaaggaagttctagaagatgcagctaactgaactttccatcaaaaatcagaatgtgtttgtacagcactatatagatggcaaagaagaaatgtcttcttttttgattacagtattcatcataaggacatgtggcgcgaaagaatggaagacttatcttcccggtttttcgcaagagaggaattggcggcgtacttaacctcttaccataataaattcggttcaagtgcgatgcagtctgccattgagaagctgaaggacccgtcaagtgccgcagtagtcggcggacagcaggcaggacttttaacaggaccgctttacaccatacataaaattatttcaatcattgttttagcaaagcaacaagaaaaggaactgcaagtgcctgtcataccaatcttctgggtggctggagaagaccacgatttggatgagattaattttgttcacacatctgaagagaatggacctgtgaaaaaaaagctgcctcagtcttattggaagaaatcatcagcagcgagtacatcgcttgatcaggaaaagtgtgccgcgtggatagatgatgtttttgccgcttttgaagaaacagaccatacgaatacacttctcgacaatgtgaaacgatgtttaagggaatctgttacgtttactgacttctttgaactgctgattgcggatttgttccaagaagagggcttagttttattaaattctggagatccggggattaaaaagctggaaacggccatgttccaaaagattcttcgagaaaatgatgaactcgcccgcgctgtatcagatcagcaggccttcatgcgtcaagcaggctacaaaccgattatcgagtccggaaaagagcaggcgaatctgttttatgaatacgaagaagagcgttttttaattgaaaaagacaacggccgatttgtcatcaaagagcttgatctaggatggacgagggatgaacttcatacacatatggaagaacatccagagcgtttcagcaacaatgttgtaacgagaccgttaatgcaggaatttctcattccgactttagcatttattgcagggcctggggaaatcaattattggggcgagctcaaacaggcttttgcggtgatgggcttcaaaatgcctcctgtcatgccaaggctgaacattacgatacttgagcggcatattgagaaaaaactggctgaacggaatatctcattacaagacgcgattgagcgcggaacggagaatcaaagagagacatacttcgagcgccagattccggaagagtttacggcggtgatggatcaggcgaaaagccaaattgaagcgattcacaaaacggtccggcaggaggcgttaaaggttgatcaaagcatggaacctttactcctgaaaaatgccgcttttattcaggatcagcttcaattcttagagcgcacggtgacgaagcgaattgaagaaaaagaaggctacgtcttgaaggattatgaaagaattcaaaatagcattaagccgcttcttgcgccgcaagaacggatttggaatatcatgtattatttgaacaggtacggtccaaaattcttcacgacattcaagaatctgccattttcttttcaaaatcaacatcaagttgtcaaactttgaaataaagttttaaagaaccctgaatagttcagggtttttttttatgggtaaacagtgtaaaatgaagttgtggagcgaagtggtgaatagtggtgagttaaggagagaaagtggggcaagagatcatgtttatgggtgaatatcagcataccatcgatgcgaaaggccgcatgatcgtacccgctaaattcagagaaggcctaggtgagcaatttgtgctgactagaggacttgaccaatgtctcttcggctaccctatgcacgaatggaaacaaattgaagaaaaactaaaagctcttcctctcacaaagaaagatgcccgtgcgtttacccgtttcttcttttcaggggcgactgaatgcgaactggacaagcaaggcagggtaaatatcgcatcatctctattgaattacgccaaactggaaaaagaatgtgttgttatcggggtttctaatcgaattgaattgtggagtaaagtaatttgggaacaatacacagaagagcaagaagattcatttgctgaaattgctgaaaacatgattgggtttgatatataatgattcttcgtgtataacactctaaaagcaatttcaattcatcctgataaaaggtgggaccaacacaatatgtttcaacacaagacagtacttcttcgtgaaaccgtagacggactcaatattaagccggacggtacatatgtagactgcacactcggcggagctgggcacagtacatacttattgcagcagttatccgagaaggggcgtttaatcgcttttgaccaagatgatacggcattacagcatgctaaagaagtgttgtccgactataaaggacagctcattctgattaaaagcaatttcaggtatttaaaagaatgtttgaatgaacaaggcattacagaagtagacggtattttatttgatttaggggtgtcctctccgcagctggatacaccggagcgcggattcagttaccatcatgacgcaccgttggacatgaggatggaccagtcggctacgcttacggcgaaagaagtcgttaatgagtggcgctatgaggatctcgtccgtattttctttaaatacggagaagagaagttcagtaaacagatcgccagaaaaattgaggaggcaagaatgaagtctcctattcaaactacgggccaactggtcgatctaataaaagacgcgattcccgctccagcgagaaggagcggcggacatcccgctaaacgcgtgtttcaggcaatcagaattgccgtaaacgatgaacttagggtgtttgaagaagctttggagcaggcaattgaggttctgaagccagggggcagggtatcagtcattaccttccactcgctagaagacagaatttgcaaaaccacttttaaagaaaagtcgtcgcttccagaacttcctccgggacttcctgttataccggaagagtttgaaccggagctgaagctcatcacacgaaaaccgattacggcaactcaagaagagcttgaagagaacaaccgggctcgttctgccaagcttcggattgctgaaaaaagaaaataacgaaacgcgaacgcaaaattaaaaggaggtcatcagcctatgagcaatttagcttaccaaccagagaaacagcagcggcatgcgatcagtcctgagaaaaaagtgattgtcaagaaaagggcttccattactctcggagaaaaagtgcttcttgtcctctttgctgcggcggtgctcagcgtatcgcttttgatcgtatcgaaggcgtatgcggcatatcaaaccaatattgaggtgcaaaagcttgaggagcaaatttcatccgaaaataagcaaattggtgacctcgaaaaaagcgttgctgatttaagcaaaccgcagcgcattatggacattgcgaaaaagaacggcttgaatttaaaagataaaaaagtgaaaaacatacaggaatgattcaaatgccaaaaaagaataaatttatgaatagaggagcagcgattctaagtatttgtttcgctctctttttctttgtcatcctggggagaatggcatatattcaaataaccggaaaagcgaacggcgaagtgcttgcgacaaaagcgacagagcagcatgaaaagaaacggaccatcgaagcgagccgcggctcgattttagaccgaaaaggaaaagtcattgcagaggacacagcgacgtataaactgattgcgattctcgataaaaaaatgaccactgatgtcaagcatcctcagcatgttgtaaacaaagaaaaaacggcagaagcattgtctaaagtgataaacttggacaaggccgacatccttgatatcttaaataaggaggatgcaaaacaagtcgagtttggctcagctggccgggatattacgtattcgcaaaagcaaaaaatcgaaaagctgaaactcccgggcatttcatttttacgggatacaaaacgctattatccaaacggtgtttttgcatccaatttaatcggctatgccgaggttgatcaagacacaaatgaaatttccggcgcgatggggttagaaaaagtgctggataagtatttgaaggagcgggacggatatgtgacatatgaaagcgacaaatccggctgggagctcccgaacagcaaaaataaaattacagcgccaaaaaatggtgacaatgtatatttaaccattgaccagaaaattcaaacctttttggaagacagcatgacaaaagtggcgcaaaagtataatccgaaaaaaatcatggccgcagttgtcgatccgaaaacaggcaaagtccttgccatgggacagcgaccaagctttgatccgaacaagcgggatgtgacaaactactataatgatttgatttcatatgcgtatgaacccggatcaacgatgaagatatttacactcgctgctgcgatgcaggaaaacgtgtttaatgcgaacgaaaaatataaatcaggtacgtttgaagttggcggggaacctgtcagggaccataatagaggtataggctgggggccgacaacctatcatgacggcgtccttagatcgtcaaatgttgcatttgcgaaactggcgaaagaaaagctgggatatgaccgtcttaatcaatatttacacaaattcaatttttatcaaaaaacaggtattgatttgccaggagaagtctctagcaaaatcaactttaaatatgaatttgataaggcgtcaaccgcatacggacaagcgtctgcagtcacaccaattcagcagcttcaggccgcaacggcaattgcgaatgacggcaaaatgatgaaaccttatgtgattgaccatatcgttgatcccgataaagataaaaccatctatcaaaataagccagaatcagccggaaccccaatttctgcaagcacagcgaaaaaggtgcgggatatattgggagaagttgttacgtcgaaaatcggaacagggcaagcctataaaatcgaaggatttgatgttgccgggaaaacaggtactgcgcaaatagccggtaaaggcggatatctagacggaacagatgactatatcttttcgtttatgggtatggcaccaaaagatgatcctgagcttttaatttatgttgctgtacagcagccgcaactcaaagcaggacaaagcagttcagatccggtatcagaaatcttcaacccgacaatgaaaaacagcctgcactacctgaacattgaaccaactgaaaaatctgactcagataaggaagaaacaaaagcgcagacaatgcctgatttaacagatcaaacggtagctgctgctcaaaagaaagcaaaagaggagaatctcacaccaattgtcatcggcagtgatgtcgctgtaaaagaacagtatccgaaagcggatgaggaagttctcaccaatcaaaaggtcttcctgaaaacgggcggcaaaatcaaaatgcctgatatgacaggctggtcgagaagagaggttctgcagtacggcgagctcgcgggaattcatattgaagtaaacgggcaaggctacgctgtcagccaaagtgctaagaaagacaaagaaatcaaagacaaaaccgtaatcaaggttaagtttaaaaatcctgattaaaaagaaagcttgcgttatgcaggctttctttttttatgccttcagaggagcatcgttctacctgtccaatttcaggcataaaatgaaacaagcctaaataaggagtgaacggtctcttgcgcgtctcgaatgtaacggttagaaaacgtttattatttgttttgctttttggcgtgatcgtgtttctgatcattgatacaaggctggggtatgttcagtttgtgatgggcgaaaaactgacttcgctggcgaaagattcctggagccggaacttgccgtttgagccggagagaggcgagatactggatcggaatggtgtgaagctcgcaacaaacaaaagtgcgccgaccgtattcgtcgtgccgcgccaagttcagaatccgatgaaaacgagcaagcagcttgcggcggtgctcaatatgtcagaagaaaaagtatataaacatgtgacaaaaaaagcgtcaatcgaaaagatcactcctgaagggagaaaaatttcaaatgagaaggcgaaggaaattaaagcgcttgatttaaaaggtgtgtatgttgcggaggacagtatccgtcattacccgttcggcagctttttatctcatgtgcttggatttgcaggaattgacaaccaaggactccttggattggaagcctattacgacgatgatttaaaaggggaaaaaggttctgtcaagttttatacagatgccaagggtaaaaaaatgcctgatgaagcggatgactatacgccgcctaaggatgggcttgatatgaagctgacggttgattcaaaggttcagacgataatggaaagagagcttgataacgctgaggccaaatatcatccggacggcatgattgccgtagccatgaatccgaaaaacggagaaattttggggatgtctagcaggcctgacttcgaccctgctgattaccaatctgttgatccgtccgtctacaaccgaaatctgccagtatggagcacgtatgaaccgggatctacctttaaaattattacacttgcagcagcccttgaagagcaaaaagtaaatttgaaacgggatcaattttatgataaagggcatgcggaagtggacggagcgagactgcggtgctggaaaagaggcgggcacgggctgcagacgtatctggaagttgtgcagaactcctgcaacccggggtttgttgaattaggcgagcgcttaggaaaggaaaagcttttcaaatatatcaaagactttggttttggacaaaaaacggggattgatctccaaggcgagggaacaggcatcttattcccgcttgagagagtaggcccggtggagcaagcaactacggctttcggacagggagtatccgtcacgccgattcagcaggttgcagcagtctccgccgctgtaaacggaggaacgctctacacaccttatattgcaaaggaatggatcgatcctgttacgaagaaaacggtcaaaaaacaatcaccaatcgcaaagaaacaagtcatttctgaggaaacatccaaacaaatccgctatgctctagaaagcgtcgtcgcagaaggaaccggccgcaatgcatttgtagaaggatatcgtgtcggaggaaaaacgggaactgcacaaaaggttaaagatggaaaataccttgaaaacaaccatattgtatcatttatcggtttcgcgccagctgatgatccgagtctagtcgtctacgttgcggtggataacccgaaaggcacgattcaatttgggggaacggttgcagcgcctattgtcggaaatattatgagagacagtctgccggaacttggtgtgaagccccggaaaaatcaaatcgagaaaaaataccaatggaacgacacaaaaacaatagaagttccgaatgttgtagggatgtctgtctcagatcttgagtcactattggtgaatctcaatgtggatgcttccgggaaagggagcaaaatcgttaaacaatcgccagctgccggaacgaaagtaaaagaaggctcaaagatacgcgtgtatttgactgaagaagatgaaaaggaggcagccgattgattcgggctgcctattcttttattgcagaaaaaatgctgatatctttcaagattagctggatgtatccttttatttacgctaaaatatgaactgtatgcttaaaatcattaccacatcatttgatgtgacttcaatgataaaaagaacgaattagaatgttgagaggtttgatacgatgaaacttacaaagctgcttacatacttaacaaccgaaccttctgtaaacgactcacaagaccctgaaataacttcaattgagatggactccagggaagtaaagaaagggagtctttttgtatgtgtaaaagggtatacggtggatggccacgattttgcgcaaaaagcagtagaaaacggtgcagcggctattgtggcagaaagagaggtcgatgtgaatgttcctgttattattgtccggcagtcacttcgcgcgctcagcgttttgtctgatgcgttttacggacagccgacgaagaagcttcagctgattgggataacagggacaaacggcaaaacatcaacgacccacatggtcgatgagattctgaaaaaagcgggaaaacgcacaggcttgatcggtacaatgtacatgaaaatcggagacgaaacacttcctgttaaaaacacgactccggaaagcgtcacgctgcagaaaacgtttaagaaaatgaatgacaagcatgttgacactgcaatcatggaggtttcttcccacgctttgtctttaggacgcgtccatggctgtgattatgatattgccgtgtttacgaatttaacacaggaccatctggactatcataaaacgatggatgagtaccggcatgcaaaaagcttgctcttttcccagcttggcggggctttcaaccatgaacatccaaagcgtgccgtcctgaatgctgacgatgaggcgagcgcttattttgaaaaggtaacagctgcgcatatctctacatacggaattaaaaacgatgctgatgtgatggcgaagaacatcagtatcactgcacagggcacaagctttgatctcgtgacaaacaaaggcacgaagcacatcacgatgtctctcgtcggacaatttaatgtgtataacgtgctggccgctgttgcgacatgtattgcagcaggcataccgtttgaaatcatcactgaagctgttgaagaattgcatggtgtaagaggccgttttgaattggtcaatcagcagcaggagtttccagtcattgtagactacgcgcacacaccggacagccttgaaaatgtgctggagacatgcagagacatgacggaaggaaagctatttgtcgttgtcggctgcggaggagacagagataagacgaagcgcccgaaaatggctaaaattgctgtggagctggctgacgagccgattttcacgtcagataacccgagaagcgaagatcctcgcgcgattttaagagatatggaagccggagtagagaacgcatactatcacagtattgcaaaccgcgagcaggcgatctttttcgcaattgccaatgccaaaaaaggcgacgttgtcctcattgcgggaaaaggacatgaaacctatcagcagatcggaaatgaaactttcgattttgatgatgctgaagtagcggcgagagccattgttgaactcaataagaataagacgaattcataggaaagagatgttactgaataatggagcttgaaaagatttttcatatggaaaaaaatcatgaatatgataactacgtatgtcgtttgaaagaaacaggaggagaaaaggacaatgcttgagcaagtcattctgtttacaattttaatggggtttttaattagtgttctgctctctccgattcttattccgtttttaagaagattaaaattcggccagagtattagagaagaaggaccgaaatcacatcagaaaaaatcagggacaccgacaatgggcggggtcatgatcatactttctatcatagtgacaacaattgttatgacacagaagttttcagaaataagccccgaaatggtgctgcttctgtttgttacgctaggctacggtttgcttggctttttagatgattacatcaaggttgtcatgaagcgcaatcttggattgacatcaaagcaaaagctgatcggacaaattattattgcagttgtattttacgccgtgtatcattactacaattttgcgacggatattcgcattcctggaactgacttatcatttgatcttggctgggcttactttatccttgtgctctttatgcttgtcggcggatcaaacgcagttaacctgactgacggccttgacgggttattgtccggtactgcggcgattgcctttggcgcctttgccattctggcatggaatcagtctcaatatgacgtagcgattttctcagttgccgttgtcggtgcagttctgggcttccttgtatttaatgctcatccggccaaagtttttatgggagatacgggatcgcttgcattgggaggagccatcgttaccattgccattttaacgaaattagagatcctgctggttatcatcggcggtgtattcgttatcgagacattatctgttattttgcaggtcatcagctttaaaacgacaggtaaacgaatctttaaaatgagtccgcttcatcaccattatgagcttgtcggctggtctgaatggagagtagtcgtgacgttttgggctgcgggacttttgcttgccgttttaggaatttacatcgaggtgtggttataagtggaaaatgatcaatttttacagaaacagcattttttaatccttgggcttgcgaaaagcggatatgcggcggcctccattcttcatgaaaaaggcatttatgttgcagtcaatgaccaaaagccttttgaagaaaatgaaccggcacaaaagctttctgaaaaaggaatcgaagttgtttgcggagagcatccagtttctctgttcgatcagcatcaaatcacgattctgatcaaaaacccgggaattccttatgaaaatattatggttcaggaagcggagaaacgaggcattccggtttggacggaaattgagctcgcttactacctgaccagcgccaagtttatcgggattaccggatcgaacggtaaaacgaccacgacaacgctaatttacgaaatgctcaaagctgactcgcaaaaagcactgattgccggaaacatcggcacagtcgcaagtgaggttgcctatcatgctgatggagatgaatggatcgttaccgaactgtcttcgtttcagctgatgggaacacacgctttcagaccggaaatcagcctgattttaaatgtatttgacgcccatctggattatcaccatacgcgcgaaaactatgaaaaagcgaaacagaaagtgtaccttcatcagactgcttcagataaagccattgtcaaccaggatgatgaaaccgtcgtgcgtcttgctgaagccggaaaagccgaaatcgtcccgttttcagtcagcaaaacgcttgaacagggcgcatatgtaaaagacagtatgattatgtttaacggcgaagccattcttcctctggaagaggttgtactgcccggtgctcataacctggagaacattttagcagctattgcagttgtgaaaacggcaggagcatccaatgaggcggttaaaaaggtgctgacaagctttactggtgtgaagcaccgcctccaatatgtcacaactgtgaatggccgcaaattttataacgacagtaaagcaacaaacattctggcgacaagcaaggcgctttcagcttttgacaagccggtcattctgcttgcgggcggactggatcgcggaaatggttttgatgacttgaaaccttatatgaagcatgtcaaagcagtgcttacatttggccagacggcgccaaaactcgagaaactcggcaatgaactgggaatacaacatgtcaaacgtgtcgataatgttgaacaagcagtatctgcggcgtttgcgctctcaaatgaaggagatgtcatcctgctgtcacccgcgtgtgcgagctgggatcaattcaaaacatttgaagaacgcggtgacatgtttatagatgccgtgcatatgcttaagtaagggcttgtcttgaagtaaatcggcagccctaatgactttaagcttggggtgtcgattgctttgactactaaaaaaacatcgcctgatttgttattggtcatcattacgttattattattaacaatcggattaattatggtgtacagtgcgagtgcggtatgggcggattataaatttgacgactcattctttttcgcgaaacggcagcttttgtttgcgggaatcggcgtcattgctatgttttttatcatgaatgtcgattattggacttggaggacatggtccaaattgctgatggttatctgctttttccttctggtgcttgttttgataccgggcgtcggaatggtgcggaacggttcaagaagctggatcggagtcggagcattcagcatacagccttcagagtttatgaagcttgcgatgattgcattccttgctaaatttctctctgaaaaacaaaaaaacatcacatcgttcagacgggggttcgtccctgcacttggcatcgtgttttcagcatttttgattatcatgtgccagcctgacctcggaacggggacagtaatggtcggaacttgtattgtcatgatttttgtagccggcgcgcggatcgcccatttcgtctttctcggactgatcggcctcagcggatttgtcgggctcgtactatcagctccatatcggattaagcggattacctcatacttaaatccatgggaagacccgctcggaagcggatttcagatcattcaatcgctttatgcagtggggcccggtgggttgttcggaatggggctcggacaaagcagacagaagttcttttatctgcctgagccgcaaacagactttattttcgccatcttgtcagaggagctgggctttatcgggggaacacttattttgctcctcttcagtgtcctgctgtggagaggaatcagaattgcgcttggtgcgcctgatctgtacggaagctttgtcgcagtcggcattatttcaatgattgccattcaagtcatgatcaatatcggcgtagtcacgggcctgattcctgtaacaggcatcacgctcccgtttctgagctacggaggctcttcattgactctaatgctgatggcagttggtgtgctgctgaatgtaagccgctactcgaggtattaacgaatgtatgtccatgcttcctgtctaacatgaagcttggaaacaattgatgcgataaccctgtccaacaaaacagggttatcgttatgttatagagaaacttagactgggggaaaagaaatgcgaattgcaataagcggaggcggtacagggggacatatttatcctgcgcttgcttttattaaagaagtgcaaagacgtcatcctaatgtggaatttttatatatcggaacagaaaacgggctggagaaaaaaattgttgagcgggagaatataccgtttcgttcaattgaaattacaggatttaaaagaaaattgtcatttgaaaatgtcaagactgtgatgcgttttctgaagggcgtcaaaaagagtaaatcgtatttagcggaatttaagcccgatgccgtaattggaacgggcggttatgtatgcgggccggttgtctatgccgctgcgaaaatgggaattccgactattgtccatgaacaaaacagcctgccgggcatcacgaataagtttctttcaaaatatgttaataaagtagcgatttgttttgaagaagcgaaatcacattttcctagcgagaaagttgtatttacgggaaacccgagagcctctgaagtcgtctcaataaagacgggacgatcaatggctgaatttgggctttctgaagacaaaaaaacggtcttaattttcggcggaagccgaggcgctgcaccgattaaccgcgctgtcattgacatgcaggatgcgctgaaaacaagagactatcaagtgctgtatatcaccggtgaagttcactatgaaaaagtaatgaatgagctgaaaagcaagggtgccgctgataatatggtcacaaagccgtttcttcatcaaatgcctgagtatttaaaggccattgatgtcattgtggccagagccggtgcgacaacgattgccgaaattactgctctcggaatcccaagtgttctgatcccaagtccatatgtgacagcgaatcaccaggaggtcaatgcgagatctcttggccagcataatgcggcgattgtactgaaagaaacagagctcagcggggagaagctgattgaagcgctagaccggattgtactgaatgagcaaacgttaaaggaaatgagcgaacgaacaaagtcactcggtgttcctgacgcggctgcccgtttatacagcgtactcgaggaattaaaaaaatagtagaaaagcaaatggaatgcggaggtttacgatggagaaagtgatacaggaattaaaagaacgcgaagtcggcaaggttcttgcaaatgaaccgctcgcgaatcatacaacgatgaaaatcggcggacctgcggatgtattggtcattccaagcagtatagatgctgttaaagacatcatggacgtgattaaaaaatatgatgtgaagtggacagtcatcggccgcggatcaaatcttcttgttttagatgaaggaattagaggcgtagtgatcaagctgggggcgggtcttgaccatttggagcttgaaggggaacaagtaacagtcggaggcggttattcagtggtccgccttgctacatcattgagcaaaaaaggcctgtccggtttggaatttgctgccggcattccaggatcagtcggcggagcggtttatatgaatgccggcgctcacggttctgatatgagcgagatcctcgtcaaagcgcatattttgtttgaagacggaacgattgagtggctgacaaatgagcagatggatttcagctacaggacatctgtactgcaaaagaaacgcccgggcgtttgccttgaagctgttttgcagctggagcagaaggataaggaatcaatcgttcagcaaatgcaaagcaataaagactatagaaaaaatacacagccgtattcaagcccttgtgcgggaagcatattcagaaatccgcttccgaatcatgccgggaaccttgtagaaaaagcaggcttgaaaggatatcaaatcggcggtgcaaagatatcggagatgcacggaaacttcatcgtcaatgcgggaggagcatcagcaaaagatgtgcttgatctcattgaccatgtgaaaaagacaatccgtgaaaaatacgagattgatatgcacacagaggttgaaatcatcggcggaaatcgctgattcaagttctgactgaagctgttcatatgatatactgtaagcaaacgacaaacggcatcatagtatgccgtttgttttggaatagacagacttttaacagctgtttcatttgaatgaggtgaacaggcaatgaacccgggtcaagaccgagaaaaaatcgttaacattgaagagcggatccctaaaattaaagagcagaggaaacaaaaggcaaaccgccgtctcatttcatttattatgctcttttttattatggtgctgatcattgtgtacctgcaaacaccaatcagtaaagtatcaacaatctctgttacagggaatgaaaatgtatcaaaaaaggaaattatcgacctttccgatattaacagcggagatactgagttttggagtttggacaagcaaaaaacagaaaagaagattcagcaaaataaattagtgaaaaaagcggagatcagcaaatcgcttcctaataaaatcaacattgcaatcgaagaatataaagcgattgcttatttagaaaaagacgatgtgtactatgaagtgcttgaaaacggctcagttctgccaaacgaagtaacgccggatgatgccggaccgattttagtgaattggacaaacgcgaagaagcggtctcaaatggccaagcagctcgatgcgttgtcaaattcgttaaaacagtcgatttcagagatttattatacgcctgtaaaaatggatgaaaaccgtattaagttgtacatgaacgacggttatgttgtcactgcatctattaaaacgtttgcagaccgaatgaagacgtatccttctatcatttctcagctaagcagcaataaaaaaggaatcattcatttagaagttgccacctattttgaagagtttgggaaaaacgataaggctgctaaaaaggaagatgaaaattgaggggcaaatcagcagtccttctttccttgattatgcttatcgcaggctttttgatttcattttcttttcaaatgacaaaagaaaacaacaaaagcgcggctgagacggaagagtggaaaaaagaatatgcgctgagagatgaacttctgaaacaagagaaagaaaataagaagcttgaaaaagaattatatcaaaagcaaaacaaagtccgccaggcggaaaataagctgaagaaagagaagtcggaatactataatgtcctcgaagatacagaaaaatacaggatgtatattggggaagtcggtgtgcagggagaaggcgttgaggtgacattggaagatgcgtcatacataccggaaggggagaatgtgaatagttacatcgttcacgaaagccatatcttccaagtagtaaacgaaatgtatatctcaggagcggcagctgtcgccgttaatggacagcgtttgacgcatgattcgtatatcaaatgcaatggtcctgtggtaacggtagacggggtgcagcatcccgctccatttacggtatccgctattggagatccagatgtcctgctgccctcgttaaatatcgctggaggcctaattgatcagctgtcaatggatcatatttctgtgtcggcagaaaaagagaaaaacgtacaaatgaaaccgattctgaaaacgaaggaatgactgaaaaagcgggtgaaatagattgaaaataaagcgttccttcataagcatcagtgtgcttatggtcatcttcggcctgatgatatctgttcagtttaattcgttaaagcaccccaaagtccgggatacaagagatatgtgggatattagggaagagctgacatcagagcagaagaagcaggaaaagctgctgtctgaaataaacaaatatgacaaacttctgaatagctattcgcaaacgaaagaaatgacaaaagaaaccgcgctaaataataccttgcaatccttaaaaaaaacagccggcatgaccgatataacaggtagcggaattgtcattacgatttccccgcttttttctgaaagcttaacaggagagccggtcgaaaatccgcctccggatttgctgaaaaagctgattaatgaactcaactcctacggtgcagagcatatctcgattaacgagcgaagagttgtgaatcatacagttatcagagatataaacggcactacaaaaatagacggatacgcccttgacgattatcctttaacagtaaaagtgcttgccaaagatccggacatgttacacagcggagtgaaggggtcaggccttgaggatctttttgcatctgaaaatttagcattaaaagccggtaaatctgaaagcaaactaacattaaaagcatatgacagaccactggacgtacaacagctgaaactgcttaaagactgaaaaggaggagaattgtcatgtggctgcccgtgttgggactggtgctcggaatagcgattggactaatgacaaacttaacgataccgagtgaatactcaaactatttatcgcttgcggtgcttgccgcacttgatacattaatcggcggaatcagagcgcatttacaaggtacatatgatgaaatggtatttgtttccggtttcttttttaatattatattggcaataagtttagcttttctgggagtccatcttggtgtagacttgtatttagcaggtatattcgcatttggagtcagattatttcagaatatagccgttatcagaagaaatctactaacaaagtggactctttctaaaaaaaataaaaaaaatgtgatataaaagaggatatacataggatataacgaatattttcaataaacataaaatgtgaaaagcacataaaaatattctgttgttattttttgttacacacttgtaaagccacattcattgtattgttgttccgcaaataatagaatagaaatgatcgaaatgtgaggaggtgccatagaatgaacaacaatgaactttacgtcagtcttgacatcggtacgtccaatacaaaagtgatcgtcggagaaatgacagatgattcccttaatattatcggtgtgggaaatgtaccgtctgaagggttgaaaaaaggctcaatcgttgatatagatgagaccgttcattctataagaaaagcgtttgaccaagctgaaagaatggtaggttttccgcttagaaaagctattgtcggcgttaatggaaattatatcaatattcaagatacaaacggtgttgtagcagtttccagtgaaaataaagaaattcaggttgaagatgtacgccgtgtcatggaggcggcacaggttgtttcagtaccgcacgaacagctgattgttgacgtcattcctaaacagtttatcgtagatggaagagatgaaatcaccgacccgaaaaaaatgctgggtgtgcgtttagaagtagagggcaccttgatcaccggttcaaaaacaatcttacataacttactccgctgcgttgaaagagctggtattgaaataactgatatttgccttcagccgctggcagccggttctgctgcattatcaaaggacgagaaaaaccttggtgtggctctcattgatatagggggagggtcaacaaccattgccgtattccagaacggacatctcacttctacccgtgtcattcctctcggaggcgaaaatatcaccaaagatatctccatcggattgagaacgtcaacagaagaagcagaacgcgtgaaaaagcaatttggacatgcctactatgacgaagcctcggaagatgaaatatttgaggtaaccgttataggcaccaatcaaaaacaaacatttacacagcaagaagcagcgaatatcattgaagcgagagtagaagaaattcttgaaattgtttcagaagagcttcgcagtatgggaattaccgatctgccgggaggcttcgtgctgacaggaggacaagcagctatgccgggtgtcatgtctttggcgcaggatgtgctgcaaaacaatgtcagagtggcaagcccgaattatatcggtgtaagagatcctcaatatatgacgggagtgggcctgatccaattcgcctgccggaatgcaagaatccaaggcagaaaaataggctttaagatgcctgaagaagcgatacaggaaatcgcagtctcatcatctgaggaacaagagcagcatcatcaccaaaatgaggtgcagcagcggccaaaaggaaaacaaaaaacacaagccgaacataataaacagagcaaaatgaaaaaactattaagcatgttttgggaatagatagatagtcattcggcagattaggaggatttagcatgttggagttcgaaacaaacatagacggcttagcatcaattaaagtaatcggagtaggaggcggtggtaacaacgccgttaaccgaatgattgaaaatgaagtgcaaggagtagagtatatcgcggtaaacacggacgctcaagctcttaacctgtcaaaagcagaagtgaaaatgcaaatcggcgcaaagctgactagaggattgggagcaggtgcgaatccggaagttgggaaaaaagccgctgaagaaagcaaagagcagattgaagaagcacttaaaggtgctgacatggtattcgtgacagctggtatgggcggcggaacaggaacaggtgccgcaccggttatcgcacaaatcgcgaaagacttaggcgcattaactgtcggcgttgtgacaagaccgtttaccttcgaaggacgcaaaagacagcttcaggctgcaggcggaatctcggcaatgaaagaagcggtggatacactgatcgtgatcccgaacgaccgtatccttgaaattgttgataaaaacacaccgatgcttgaagcattccgtgaagcggataacgtacttcgccaaggggttcaaggtatttctgacttgattgctacacctggtcttatcaaccttgactttgctgatgtgaaaacaatcatgtcaaacaaaggatctgctttgatgggtatcggtattgctactggggaaaatcgcgcggcagaggcagcaaaaaaagcaatttccagcccgcttcttgaagcggccattgacggtgcgcaaggtgtcctcatgaacatcactgggggaactaacctcagcctatatgaggttcaggaagcagcagacattgtcgcttcggcatctgatcaagacgtaaacatgattttcggttctgttattaatgaaaatctaaaagatgagattgtggtgacagtgattgcaaccggctttatcgaacaagagaaggacgtgacgaagcctcagcgtccaagcttaaatcaaagcatcaaaacacacaaccaaagtgttccgaagcgtgagccaaaacgtgaggagcctcagcagcagaatacagtaagccgtcatacttcacagccggctgatgatacgcttgacatcccgacattcttaagaaaccgtaataaacgcggctaatgtaaaggacaaaatcgttttcgattttgtccttttttgtttttctcttcacactttccttcttataaagtctttttccctattgcttccttcgcttagtaacaaaacagataattagacctatttatttttgtgacatttctatcattttcatatatatggaaattgaatgacatgaaacgacaatatctgtaattcagattgtctacagttaatatacagcgatgttctgacaaaccattcattattaaaaggagggacgacactttttttaaaaagcatgttgaaaaagggggatgaaaatgaagaaaaaaacgaaaaacagactcatcagctctgttttaagtacagttgtcatcagttcactgctgtttccgggagcagccggggcaagcagtaaagtcacctcaccttctgttaaaaaggagcttcaatctgcggaatccattcaaaacaagatttcgagttcattaaagaaaagctttaaaaagaaagaaaaaacgacttttctgattaaatttaaagatcaggctaacacagaaaaagcggcaaaagcggctgttaaaaaagcgaaatcgaagaagctgtctgccgctaagacggaatatcaaaagcgttctgctgttgtgtcatctttaaaagtcacagccgatgaatcccagcaagatgtcctaaaatatttgaacgcccagaaagataaaggaaatgcagaccaaattcattcttattatgtggtgaacgggattgctgttcatgcctcaaaagaggttatggaaaaagtggcgcagtttcccgaagtggaaaaggtgcttcctaatgagaaacggcagctttttaagtcatcctccccatttaatatgaaaaaagcacagaaagctattaaagcaactgacggtgtggaatggaatgtagaccaaatcgatgctccaaaagcttgggcacttggatatgatggaactggcacggttgttgcgtccattgataccggggtggaatggaatcatccggcattaaaagagaaatatcgcggatataatccggaaaatcctaatgagcctgaaaatgaaatgaactggtatgatgccgtagcaggcgaggcaagcccttatgatgatttggctcatggaacccatgtgacaggcacgatggtgggctctgaacctgatggaacaaatcaaatcggtgtagcgcctggcgcaaaatggattgctgttaaagcgttctctgaagatggcggcactgatgctgacattttggaagctggtgaatgggttttagcaccaaaggacgcggaaggaaatccccacccggaaatggctcctgatgttgtcaataactcatggggagggggctctggacttgatgaatggtacagagacatggtcaacgcctggcgtgcggccgatattttccctgagttttcagcggggaatacggatctctttattcccggcgggcctggttctatcgcaaatccggcaaactatccagaatcgtttgcaactggagcgactgatatcaataaaaagctcgctgacttttctcttcaagggccatctccatatgatgagataaagccggaaatatctgcaccgggcgttaatattcgttcatccgttcccggtcagacatatgaggatggttgggacggcacatcaatggcagggccgcatgtatccgctgttgctgcactgctgaaacaggcgaatgcctcactttctgttgatgagatggaggatatattaaccagcacggctgaaccgctcacggattcaacatttcctgattcaccgaataacggatatggccatggtctggtgaatgcttttgatgctgtatccgctgttacagatggtttagggaaagcggaaggacaagtttctgtagagggggatgaccaagagcctcctgtctatcagcatgagaaagtaactgaagcttatgaaggtggtagcctgccactgactttgacagctgaagacaatgtgagtgtgacatctgtaaagctgtcctacaagcttgatcaaggtgaatggacagaaataacggctaaacgaatcagcggtgatcatctaaaaggaacgtatcaggcagagatcccagatataaaaggaactaaactaagctataagtggatgattcacgattttggcggtcatgtcgtttcgtctgacgtatacgatgtaacagtgaaaccaagcatcacggcgggatataagcaggactttgaaactgcacccggcggctgggttgcgagcggaacaaataataactgggaatggggagttccgtcaactggcccaaatacagcagcatccggagaaaaagtatatggaacgaatttgacaggaaattatgccaactcagcaaacatgaaccttgttatgcctcctattaaagcacctgattcaggaagtctgttccttcaatttaaaagctggcacaatttagaggatgattttgattacggctacgtttttgttcttccggaaggtgaaaagaattgggagcaggctggtgtctataacggaaagacatcaagctggacggacgaagaaattgatttatcggcttataaaggccaaaacattcaagtgatgtttaaccttcaatctgatgaaagcattgcaaaagagggctggtatattgatgatgtagtgctttctgacaaatcagccggaaaaacagtcaaaaagaataagctgggcgtcgaaaagccgtctggaaagcaaaagaaaaagccagtaaatccgaaaaaggctaagccatctgcaaacacagcggtaaaacatcagaacaaggctatacagcctcaagttttgccgctcagggcacaagtcagtgtagtggaaacaggaaaatcaacatattcagatcaatccacagggcagtacacgctgaagcacaaagcgggagactatacgcttatggcagaagcatatggttatcagtcgaaaacacaaaaagtatctttaaagacggatcagacgacacaagctaattttacgttagaagagatgaagaagggcacattaaaaggcatggtcatcaataaaacgacaggagagccggtaacaggcgcttccgtttatgttgtagaggatgctgctgtggaaccggctatgacaaacgacaaaggtgaatatacgctggaggcctatgaaggcgcttatacgattaaagtcgctgcaccgggttattacagtgatgaattttccgttgagttaaaaggtgatgttacaaaagaaactgcattgaagcctttcgtcggttatccgggtgaaattgcatatgatgacggaacagcggagaatgccaattcctattttgctgccggtaacggatgggcggtaaaaatgacgctcgctgacggcaaggacaaaggcatgcttacaggagggctgttcagattctgggatacagagttcccagatccgggcggcacagagtttaaggttgaggtatacgatgccacaggaaaagacggagcaccgggcaagaaaattgcagggccatttaacgctgaagctcttcgcaatggcgagtggactaaggtagatctcagttcaaaagggattatggtcgatagagacttttatctcgtatatatccagtcaaaacctgacccgtattcacctggactggcaatggatgaaaccggcaagaattccggccgcaactggcagtatataggtggacaatgggagccgggtgacgaagcagacggcaactatatgattcgcgcattagttaattatgaagctgctgtacctgagattacttcaccgacagacaaatcatacacaaataaggatagcgtcactgtaaaaggaaacgcttctcctggcacaacggtacacatttataatggagagaaagaagcaggagaaacgaaagctgctgcggatggcacgttccatgcaggcatcatactcaacaagggtgaaaatgagctgacggcaactgcatcaactgacaacggaacaacagatgcctccagcccaatcacggtcacgcttgatcaagaaaagcctgaattaacactggacaatccaaaggatggcgggaaaacaaataaagaaacgctgactgtcaaaggggctgtatccgatgacaatctgaaagacgtcaaggtgaatggcaaaaaagcaacagtagctgatggttcatactcagcccgtattcttttggaaaatggaagaaatgaaatcaaggtaattgctacagacttggcaggcaacaaaacgacgaaaaagacagtcattgatgtgaactttgacaagcctgtcatttccggcttaattccgggagaggataaaaacttaaaagccggtgaatctgtgaaaatcgctttctcaagcgctgaggatttagatgcaacgtttaccattcgtatgccgctgacgaatgcaagagcgagtgtgcaaaatgccaccgaactcccgttaagagaaatctctccggggagatatgaaggctattggactgccacttcttctattaaagcaaaaggagcaaaagtagaagtgatcgtccgagatgattatggaaatgaaacaagaaaaactgcgaatggaaaacttaatatcaacacagaaaattaagtggaaaaaagctgccgtcattggcagtttttttatatcctctcattatacttcctcgacaaattaagcagatttccctgaaaaattgtattttcctctcaacattaattgacagactttcccacagagcttgctttatacttatgaagcaagaaggggaacagcgtgaggcaagaaagaaaggagtcagatgtgaaaatctatttagatgtcatttggctgttaaacttttgttttgatgcacttttgcttttgctcacggcatttattttaaaacggcatgtaaaaaaaagaagactggtaggcggagcgttcatcggttccagtattgtccttttgatgtttactcctttttcgccgattgttgaacatccggctgggaagctagctttttcagttgtgattgtggtggtgacatttggctttaaaagatttcggtttttctttcaaaatttgttttccttttattttgccacttttttaatggggggaggaattatcggagcccattctttgctgcagtcaaattctattgttcaaaacggtgttatgattaccaatcaaacagggtttggagacccgatcagctggttgtttattgttggtggctttccagcattatggtttttttctaaaagaagaattgaagatattgaaacaaaaaacattcaatatgaggaacgagtcagcgtgcaggcagatttgggcagccaaacacttcatgtcagaggcctgattgattccggtaatcagctgtacgatcctcttacaaaaacaccggtaatgatcatttacattgataaattggagccgattttcggaacagccgaaacgatgatcattcgaaacacagacccattggaagccatcgaacagctcgatgattcctttcgctttttagataaaatgaggttgattccatacaggggagttggtcagcaaaatcaatttttattatgcgttaaaccggatcacgtaacgattatgacaaaagaagaaatgatttctgcagataaatgtttaatcggcatcagcacaacaaagctgtcggcagatggagagtttgacgcgattattcatccgaaaatgctttcgggcaaggctgtcaaacacgtttcataatgttcgcaaatgtccgttacttatcatactcaaacggcgtgacatttagaagggagaggaagatgaaaaaactgaaattacggttgacgcacctctggtataagctgctgatgaaacttgggctgaaaagtgatgaagtctattacataggcgggagtgaagccctgccgcctccattatctaaagatgaggagcaggttttgttaatgaagctcccaaacggcgatcaggcggcgcgcgccattctaattgaacgcaatttgcgtctggtcgtatatatcgcccgtaaatttgaaaatacgggaattaatatagaggatttaatcagcatcggtaccatcggtctaatcaaagctgtgaatacattcaatccagaaaagaaaatcaagcttgctacctatgcctcccggtgtatagaaaatgaaatcctgatgtatttaagaagaaataacaaaatccgttcagaggtttcctttgatgaaccgcttaatattgattgggacggcaatgagcttttgctttctgatgtgctcggcactgacgatgacatcatcactaaagacatagaagctaacgtcgataaaaagcttttgaaaaaggcgcttgaacagcttaatgagagagaaaagcaaatcatggagctgcggtttgggcttgtcggtgaagaagaaaaaacccaaaaggatgtagcggatatgatggggatttctcagtcttatatttcgcggcttgagaaaagaattataaaaagattgagaaaagagttcaacaaaatggtgtaaaaaattttatggttagaaccccttgattttacagggatttcctgatttcgacagtttttcggtctgagtgcagtgcatatttttcccacccaaggagatacttaacgttgtacagcagctcctgtagggagggaaaaaagtgtcgagaaataaagtcgaaatctgcggggtggatacctccaaattaccagtactcaagaatgaagagatgagaaagctgtttaggcagctgcaggatgaaggcgatgattcagcaagagaaaagcttgtaaacgggaacttgcgtcttgtcttaagtgtcattcaacgatttaataacagaggggagtatgttgatgacttatttcaagtcggctgcatcggactaatgaaatccattgataattttgacctaagccacaatgttaagttttcaacatacgctgtacctatgattatcggagagatccgcaggtatttacgcgataataacccgatccgtgtctcaagatcactccgggacatcgcttacaaggcgcttcaggtaagagagcggttaatcagtgagacaagcaaggagccgactgcagaagacatcgcaaaagttcttgaagtaccgcatgaggaaattgtatttgcgcttgatgccatccaggatccggtttctctatttgaaccgatctataacgacggcggagacccgatctatgtgatggaccaaatcagtgatgagcgtaatacagattcacaatggattgaagagctggctttaaaagagggcatgagaaggctgaacgatagggaaaaaatgattttgagaaagcgattcttccaagggaaaacccaaatggaagtcgccgaggaaatcggaatttctcaagcgcaggtgtccagacttgaaaaagcggctatcaaacaaatgaataaaaatattcatcaataatgaaaagcctttaaaacgatgttgttttaaaggcttttctattgattatggatggtttacgttttggaaaaagtaaggtatcctagttcgtacaaagttttatgaaaattaaaacaattataaaaggcaataaagaggaggaccacgatgattttgcagcttgacaatgtctcactaaaacggaatgggaaatggatactgagagatattgattggaaggtggaagaaaaggaaaattgggtgctttacggcctaaatggcgccgggaagacagcgctgttaaatatgctttgctcatattattttccaacatcaggcgagatgcaggtgcttggccatgaatttggcaaaacagagcttggggaaaagctcagacgtaaaattggcctcgtctcagctgctcttcagcaaaaattgtacccggcagattcagcctttgaaattactttgagcggagcttacgcttcgattggtttatatgaaacgccaagtaaggaaaccagggaaaaagcgattggtttgttagaggacttgggagcaattgaatatgccgatcgccgctatgaaaccctttctcaaggggaaaaacaaagagcgttgattgctagagcactaatggccgatccggagttgctgatactggatgaaccagtcacagggctggattttattgcccgggaaaagctgttagatacgattacatacattgcaaacaaagaaaatgcaccatctatcctttatgtgactcatcatgctgaagaaattttgcctgtctttgataaagcccttttattaaaacagggagaggtctttggatccggagaaataaaggaaatgcttactgatcaaatactttccgctttttttgataccccaatccatgtattatggaatcaggatcggccgtttttaacaagagctgagccgataacgaatgcctgacaaacatatatagattcatcctaggggtgctttgcgaagctgagagagactttgtctcaacccttttgacctgatctggatcatgccagcggagggaagcggtgaaaagcggagtacatcggactccgtttgtttttattaagccgtttcatcacatttgaaacggcttttttgattttaaagaataggagcggatttacattggatcaacaaatagactctttgcaaaaaaaagtggaagaacataaggaggagcttattcagcttgcgaaaacgctgatttcttatcaaacacctgctccgcctgcaagaaatacagagggcattcagtcatggattgcgggatatttaaatgaattgggattctcgatcgacaaatgggatgtgtaccctggagatcccaatgttgtagggaagctaaaaggaacagattcagcagattattatagcctgattatcaatggccatgtagatgtggcagaggtaaaagaggatgaagaatgggagcatgatccatttcatccaattgaaaaaaacggtctcttaatcggtcgaggcgcttccgatatgaagggcggaatggcgtgtgtgttgtttgctgtcaaattaattcgtgaagccggcattgagcttccaggtgatctgattctgcaatcggttattggggaggaagttggagaggccggcacacttgaatgctgcaagaggggctaccacgctgattttgcaattgtcgcggatacgagcgatatgcatattcaaggccaaggcggtgtcattacaggctggatcgaaatcaaaagcagtcaaacatttcatgatggaacgagacggaatatgattcacgcaggcggaggaacattcggagcaagcgcaattgaaaaaatggcgaaaatcattgcggggctcggtgaacttgagcgccactggtccattatgaaaagttatcccggttttaaaccaggcacaaatacgattaatccggcagttatagaaggcggcagacatgcggcttttatagcggacgaatgccggctgtggatcacagtccatttttatccaaatgaaacccatgaccaagtggcagcggaaatagaagattacgtcaatcggctgagtgacagtgatatttggcttagggaaaaccgccctgtattcaagtggggaggctcatctatgatagaagacagaggagaaatttttccggcattggaagttgactctggccacccaggcgtcttagcgctaactgcctctcatcagaaagtgaaacgggagtgtccaattattgacgtttctcaatcagttacagatggcggatggctgtatgatgccggtattccatgcgtaatatacggtcctggagatctgcacaatgcacactctgtgaacgagaaggtatcgattgagcagctagtagagtatacaaaaattatactcgattttatcatcagctggtgcagccggaaaaaagaacaatgacatgaaaatttcttcttgctgacaaggttcagcctgcccgttcatatacttgaacaaaaggacggaaaaaggacgtgatggaatgatcagcatttcagaatttcaggtaaaggatgtcgtcaatgtctcaaacggaaaaaagctggggagtattggtgatattgatatcaatgtgaccactggaaaaattcaggcgatcatactcggaggaaatgggaaagttctcggattttttggaaaagaagaggaattggtcattccatggcgaaatatagtaaaaatcggggaagatgtaatcttagtccgattaagtgaaccacatgcataaacctgcttgtctgccgcagattggcaaatgccggaagtctcgattcttccggcacatttcatttagaaatatgcaaatcggcgctcaacgaatgcagtaagatgtggtaaaataagtgggaaattccgcttttttaaatgtttgtcgaaaggttggatcatcatgaatacatatcacccattcagtcttaccacaccctcgacactcatgatacaagactgggttcaaacgaatcaaaacaacaaaaaagtcattgccggatttacgacaaaaaacggcggtgtcagccaaaagccttttgaatcgttaaatacaggattgcacgttcatgacaaagatgcagatgtagttaaaaatcgtgaatatattgccgatatgtttaatactgatttgcagtcttgggtattcgctgatcagacacatgataatcgcgttcagaaagtgacgcagagggataggggaaaaggcgcccgtgagtatcacacggctctaaaagcaacggacgggctatatacaaatgaaaaaaatgtatttttagcattatgctttgctgattgtgtgcctcttttcttttatgatccggttaagtcgcttgtcggagtcgcccatgccgggtggaaaggcaccgtcaaacagattggcagagaaatggtgaagcaatggactgagaaggaaggttcaaatccctcagatatttacgctgttattggcccgtctatcagcggagcatgctatacggtagacgaccgcgtcatggatgctgtccgcgcattgccggtttcagcagaccttgccgttaatcagacggcaaaggcacaatatcagcttgatctgaaagagctgaaccgtcttatactgatggacagcggtttggcaagtgaacaaatttctgtcagcggtttatgcacggaaagcgagccgtctcttttctattctcaccgccgcgatcaggggaaaactggacggatgatgtcctttatcggaatgaaggaggcataaaagatcttgcgtgttgttgataatttacgacatataaacgaacgaataaacgaagcatgtaacagatcgggccgcagctccgacgaagttacggttattgcagtcacaaaatatgtatcacctgaaagagcacaggaggcagtagatgctggcatcacctgcctcggagagaatcgggatgcggaactgctccgcaaacaggaattgatgaaagggaatccggaatggcattttatcggcagtctgcaatcaagaaaagcaaaatctgtcgtcaatgcggtttcctatatccattccctagaccggctctcattagcgaaagaaattgaaaaacgggctgaaggtactgtacgatgctttgtgcaggtcaatacctctcttgagccttctaaacatggcatgaaaaaagaagaagtcattccattcatacaggagctttccggtttcgaacatatccttgttgccggactgatgacaatggctccgctgactgatgatcaagatcagatcagaagctgtttcaggtcgctgagagaactccgtgaccaggttcagaagctgaaccagccgaacgctccgtgtactgaactgtcgatgggcatgtcaaatgattttgaaattgcaattgaagaaggagctacttatattagaatcggctcatcgttagtcggaaatgaaacagggggtgtacagcaatgagtatgaaaaataaactgaaaaactttttctcaatggaagatgaagaatacgaatatgaatatattgagacagagcgggaatctcatgaggagcatgagcaaaaagaaaagccggcttatacggggaataaaccttcgggcaaacagaatgtagtgagcttgcaaagtgttcagaaatcctctaaagtggtgttgagtgagccgcgcgtttatgcggaggcgcaggaaatagccgaccatttgaagaaccggcgggcagttgtcgtcaatcttcagcggatacagcatgaccaggcgaagcggattgttgactttttaagcggaaccgtttatgccattggcggcgatattcaaagaatcggctcagatattttcctctgcacgcctgacaacgtagatgtatcaggcacaatttctgagctcatatctgaagacgaacatcagaggtggtaaagcgagatgatcctttatcaagttttttcggttttaagcttattaatcacaatatactcatttgccctgatcatatatatttttatgtcatgggtgccgagtacgagggaaacagcagtcggacgttttttagcttcgatttgtgaaccatatctcgaaccattcagaaaaatcatccctccgattgcaatgctggatatttcaccaatcgtagcaatacttgtgcttcggtttgcgacaaccggcttgtggggactttatcgcatgattgcgttttaatgtgacagtttgataggggcttggcagcagccaagcctctttacatagaagggaaagacgatgagcgatatatatcagcacttcagaaaagacgagcgggcctttattgatcaggcgctcgaatggaaaagaattgtccaggagcagtaccggatgaagctgaccgactttttagatccccgagagcaggtcatcctctctgctgttacgggacaggctgatgtcgggcttgctttttccggcggctatgacagagcggagcgaaaacgggcgattctgtatccagagtacattactccggaagaatcggattttgaattgcaggcgtttaacgtccgttatgctgacaagtttgtctcagtagatcatcgttctctgcttggtgcattaatgggcataggattaaagcggcaaaaattcggtgacatcgtgttttctgagacagcagtgcaattgattgtctcagccgataccgctgattttgtggctgcacagctgacccaagcaggcaaagcggcggtcagcctagagaaaattgacttgtcagaccttaacattccagcagttgatgtcgaaataagagatgacacggtttcttctttaaggcttgacgccgtctgcgcctctatgagcaggcaatcccgccagaaatcacagacgcttgtgaaaaacggccttgtgaaagtgaactggaaggtggttgaagatccttcatacatagtcgcggaaggggacatgctgtcaatcagaggttttggccggtgcagcttaacaaaaatcgaaggaaaaaccaaaaaagacaaatggagagttacgtttgaacgacaaaaatagtcggtttttcagtttttttctccatctgtgcgaaatttgttttataatgtgaactagataaccgtactgaaatgtaaaaaatggaggtggcatcatgccattaacgccaaatgatattcacaacaagacgtttacaaaaagttttcgcggatatgatgaagatgaagtaaatgaattcctagcccaagtcagaaaagattacgaaattgttctccgcaagaaaactgagcttgaagcgaaagtcaatgagctagatgaaagaatcggacactttgccaatattgaggaaacattgaataaatcaattttagttgctcaagaagcggctgaagacgtaaaacgcaattctcaaaaagaggcaaagctgattgttcgggaagcggagaaaaacgctgatcgcattatcaacgaatcgttatcaaaatcaagaaaaattgcaatggaaattgaagagctgaaaaaacagtctaaagtgttcagaacacgtttccaaatgctgattgaagctcagcttgatcttctgaaaaatgacgattgggatcatctccttgagtatgaagtcgacgctgtatttgaggaaaaggaataaattctctgattatcttgacattttcttagcttgtcgaatataatacgttcataaattcagatgaaaaaacggttgaaagggacagtcatgtttccttcaggccttcatagcgacccggagatggtgagagtccgggatggccggaatcatgtagatcagccctttagtttccttgctgaactcacagtaggttaggacgttcatcacgttacgatgctcaagaggaaaaagtgtatgctggctttttctaaaagggtggtaccgcgagataagctttctcgtcccttatgggatgagagggctttttttattttctgaaaaaatgcagtggaggaatgaaaatggattttaaagacacgctcttaatgccgaaaacagatttcccgatgcgtggaaatttgccaaaccgtgagcctgacattcaaaaaaaatgggaggaagaggatatctaccgtcttgttcaggaacggacgaaagaccgcccgaaatttgttttacatgacggacctccgtatgcaaacggcgacatccatatgggccatgcacttaacaagattttgaaagacttcattgtccgctataaatcaatgagcggctacaacgcaccgtatgtgccgggctgggatacacacggattgccaattgaaacagctctgacaaaaaacaaaaaggtcaaccgcaaagaaatgtcagtagcggaattccgcaaactatgcgaagagtacgcttggaagcaaatcgagggacagcgtgagcaattcaaacgtcttggtgtccgcggtgactgggaaaacccatacgtgacattaaaaccggaatacgaagcgcagcaaatccgcgtatttggtgaaatggcaaaacgaggctacatttacaaaggccttaaaccggttaactggtcaccttcaagtgagtctgctctggctgaagccgagatcgaatatcaagacaaacgttcagcatctatttacgtcgcttttggtgtaaaagacggaaaaggcgttcttgaaaacggcgagcgcatcattatttggacaacaacgccttggacaattccggcgaacctcggaatttcagtgcaccctgatcttgagtacagcgtgattgcagtaggtggtgaccgctttgtcgtagcaagtgcattagtcgaaaatgttgcatcggcatgcggatttgatcagtatgaagtgacaagaacggtcaaagggaaagaccttgagaacattatcgctgaacacccgctatatggcagagactctctcgttatgcttggtgaacacgtaacaactgatgccggaacaggctgtgttcatacagcgccaggacatggggaagatgactttatcatcggccaaaaatacggtttagatgtgctttgcccggttgatgaaaaaggtgtaatgacaagcgaagctcctggctttgaaggcatgttctatgatgatgcaaacaaagcgatcacacagcagctcgatgaaaaaggcgcacttgtgaagcttgaattcattactcactcttatccgcatgattggagaacaaaaaaaccaaccattttcagagcgacagcgcaatggtttgcgtctattaaagatttcagatcagacctgctggatgccattaaagaaaccaaatgggttcctgaatggggcgagcagcgtttgcacaacatggttcgggaccgcggagactggtgtatttcgagacagcgtgcgtggggtgtgccgattccggtattttacgctgaaaacggagaaccgattattacagatgaaaccattgaacatgtttctgaattgttcagacagcacggatcaaacatttggtttgaaaaagaagcaaaggatcttcttccggaaggctttacgcatcctggcagcccgaacggcacatttacaaaagaacaggatatcatggatgtttggtttgattcaggctcttcacatcaagcagtgcttgaagaacgtgatgacctcgttcgcccggctgatttatacctagagggatctgaccaatatcgcggctggtttaactcttctctttctacagcagtagccgtaacagggaaagcgccgtataaaggtgtgctaagccatgggttcgcactggatggagaaggacgcaagatgagtaaatcaatcggtaacgttgttgttccggctaaagtcatgaaacagcttggtgccgacatcttaagattatgggtatcttcagtggattatcaggcggacgttcgcgtgtctgacgccattctaaagcaggttgcggaagtatatcgtaaaatccgcaacacgttccgtttccttcacggcaaccttttcgattttgatccaaaaacaaatgcggtggctgtcgaagatcttcgtgaagtggatcagtatatgctgattaagctgaacaagctgattgataaagtgaaaaaagcgtatgatgagtacgaatttgcggttgtgtatcacagcattcataatttctgcacaatcgaattgagctcattctaccttgattttgcaaaagatattgtctacatcgagcatgcggatcatccggatagacgcagcatgcagacagtattctatgaaacgcttcttgctttagtgaagctttcagcgcctatccttccacatacggcagacgaattgtggtctcatttaacatttgttgaagagcagagcgttcagctgacagatatgccggaaacaatcgcggttccaaacagtgaagtgactgaagaaaaatttgaccgttttatggctcttcgtgatgacgtgctaaaagcattagaaactgcgcgaaatgaaaaaattatcggtaaatctttggaagcaaacctgaaattgtatccaaacaaagaaaacaaagagctcttggcttccataaaagaaaacctttctcagctgtttattgtgtctgaactgacaatcagcgaagaaaatgatgcgccgaacgatgcgcaaagctttgcgacgggtaaaatcgctgtcgagaaagcggaaggcgaaatgtgtgagagatctcgtgtgatttcaaaagatgtaggggcaaatccgaaatatcctacactttcattacgcaacgctgaaatcgttgaaaaatactatcaaaaataatgaaaagggcccggcgtaaaagccgggctttttttgtgccaagagtgacatcctttagaacggcaggaaaaatcttatgggctttagatcatcattcataggcaacaataaaggtactacgttaagagcaggagttgtgaagaatgaatgatcaactgaccgcaatttatacggaacttcttctgatgaaagaagaattacagtcgagattatttgagtattcttgctttcaggtttctacaagcccgcaagcagcaatcaatcataaacaaaaagcaactctgatctatcatattaaagaagagcttcaagacgttctccttgcattgtccaaaatcgaaaacggcacattcggatactgtgaagaaaccggggctcccattcctctttcaaagctggcagtgctgccgacggcccgaacagcaaacgattttctttattctgtccaatttgagaaaaaaacgcttccgatatggaaatcaacggatatcgaatatggtcaggcactgtatgaataacagtgtctggccggttattatgcctgatatttctttactccagtgctttttattgataaaatgcataatggattaaagtaaccgtaaactggaggaacgtttgtgctgtattatatgattgcactacttattattgcagccgatcaattgacaaaatggctagttgttaagaacatggaacttggccaaagcattccgatcattgatcaggtattctatatcacctcccatcgcaatacgggtgctgcatgggggatattagcgggtcagatgtggtttttctacctcataacaaccgctgttattattggtattgtttattacatacagcgttatacaaaaggacaaaggcttcttggcgttgctctcggacttatgcttggcggtgccatcggcaactttatcgatcgggctgtcagacaggaagttgtggattttatccatgttattattgtcaattacaattacccgatatttaacatcgcggactcttcattatgtgtcggcgtaatgcttttatttatacaaatgctgttggacagcgggaaaaagaaaaaggagcaatagcatgaatcaaattgatataaccgcttcagaagaacaaaaaagtgagcggattgataaatttttggcatcgactgagaatgattggtcaagaacccaggttcagcaatgggtaaaagacggacaggttgtcgtgaacggaagcgcggtgaaagcgaattataaaattcagccgggtgatcaggtgaccgtcactgtacccgaaccggaagcgctcgacgtcctggcagagcctatggatctggatatttattatgaggaccaggatgtgctggtcgtcaacaaacctcgcggaatggttgttcacccagcacccgggcatcttacgggcacacttgtaaacggccttatggctcattgcatagacctttccggaataaatggtgtgatgcgcccgggtattgttcacagaatcgataaggacacgtccggtttattaatggtggcgaaaaatgatatggcgcacgagtcacttgtaaaccaattggtcaacaaaacggtcacgcggaaatatacggcagttgtccacgggcttatttctcacgatgatggcacaattgacgcgccgatcggacgagataagaaagaccgtcaaagcatgactgtgacacgtgatggcaaaaacgctgtcactcattttcatgtactagagcgttttcaggattttacgttagtggaatgccagcttgaaacagggagaacccatcaaattcgtgttcatatgaaatatatcggcttcccattagcaggcgatccgaaatacggcccaagaaaaacaatcgactttaatggccaagcgcttcacgcgggagttttaggttttgaccatccacgaacaggagaatatgtcgaatttgaagcgccgcttcctgaggatatggcagaattaatcgaaaacctcagaaaaaacggttgacagagggtttcttttctgaaataataaacgaagctgaatagattctttaaaacagtccagagaggctgagaaggataacggatagacgggatgcgtgtataggcgcgcaccttgtcctaaaacccctctatgctctggcaggaggggttttttcttctatatgaactgtgaggtgtcacacattgaatcaaaaagctgtcattctcgacgaacaggcaatcagacgggcgctgaccaggattgctcacgaaatgatcgaacgcaataaaggaatgaataactgcattcttgtcggcattaagacaagagggatttatctggcaaaacgccttgcggaacgcattgaacagattgagggaaatcctgttacagtcggtgaaattgatattactctttacagagacgatctttctaaaaaaacgagcaacgatgaaccgcttgtaaaaggtgcagatattccggtagatatcacagatcaaaaagtcattctcgttgatgatgttctgtataccggaagaacagtcagagcaggaatggatgcgcttgttgatgtaggcagaccttcctccattcagcttgcagtgcttgtggacagaggacaccgggagctgccgatccgagcggattatatcgggaaaaacatcccgacatcaaagtctgaaaaggttatggttcagcttgatgaggtagaccaaaacgatctcgtcgccatttatgaaaacgaataatagatcacctttttaagggcaatccagagaggttgcaaagaggtgcacaacaaaggcccaaaaagcattcggcaggtctttgtatgcctctttgcgtaaaaaagcaaagaggtttttttatacagtcattgagtcatcctaaaatgaaagtcaacaatcagggggaaatcatcatgagtaagaaaaaagtaaatttaggggtcagggatgtcccgacacctttctcttgggtttcattcagccttcagcatttgtttgccatgtttggctcaaccatcttggttccgaagctcgtcggaatgagtcctgctgtggcgttggtgacaagcggcatcggaacactggcgtaccttcttattacgaaagggcaaattccggcgtatctcggttcatccttcgcctttatttctccgatcattctggtaaaagcgaccggcgggccgggagcggcaatggttggagcgtttcttgcagggctggtgtacgggctgattgccttattgatcaggcagcttggaacaggatggctgatgaagattctcccgcctgtagtcgtagggcctgttattatcgtcatcgggctgggactggcaagcactgcggtaaacatggcgatgtatgctgatccaaatgcgagtgagttggtctacagcttaaagcactttagtgtcgcaggagttacgctggcaatcacgattatttgtgcgattttcttacgaggatttttaagcctgattccggttctgatcggaatcatcggcggatacctgtttgcccttactcaagggattgtcaacttccagccggtgcttgacgcgaaatggttcgcagtgcctgaatttatcattccgttcaaagattattcaccatcagttacactcggcatcgcagccgcaatggttcctgtcgcatttgtcacaatgtcagagcatatcggccaccaaatggtgctgagcaaggttgtcggacaagacttcattaaaaagccaggtcttcatcgctctattatgggtgacagtgtggcgacaatcctcgcttccctgatcggcggtccgccgacaacgacttacggagaaaacattggcgtgctggccatcacaagagtattcagcgtctttgtcatcggaggagcggcagtgattgcctgttgcttcggctttatcggcaaaatttcagcgctgatcagttcagtgccgtcagcggtcatgggaggcgtctccttcctgctgtttggaatcattgcttcaagcggtctgagaatgctgattgacaacaaaattgattatgaaaacaacagaaacctcattattacatcagttatccttgtcatcggtgtaggaggcgcttttatccaagtgtctcaaggcggattccaagtgtcaggaatggcgcttgccgcaattgtcggtgtcatcttaaacctgattcttccgcaggcgaaggaagagcagaaagacacatctgaacaacatcatatctaaaaccttttaatgaaagtccagagaggcttggaagggttatgaagagaagggagcttcaatgctgccctctatttaaccataccccgagtctatcttagaccggggtttttttcagccttaagttgaaaagagaggggaaagaacatgaagcatttaacgacgatgagtgaactcggcactgaggaaatcaaagatttgcttcaaacagcacaagaccttaaaagcggaaaaacagacaatcagcttacaggaaagtttgccgcaaacctgtttttcgaaccgagcacgagaacgcggttcagctttgaggtcgcagaaaaaaagctgggcatgaatgtgctcaaccttgatggaacaagcacaagcgtgcaaaaaggcgaaaccttatatgacacgatccggacgctcgaatcaatcggtgtggacgtctgcgtcatcaggcacagtgaggatgagtattatgaagagcttgtcagccaggtgaacattccgattctgaatgcgggagacggatgcggccagcatccgacacaatcactgcttgatttaatgacgatttatgaagagttcaatacgttcaaagggcttaccgtctccattcacggcgacatcaagcatagcagagtggcaaggtcaaatgcggaagtgttgacaagattgggtgcccgggtcctattttccggcccttcggaatggcaggatgaagaaaatacattcggtacgtatgtctcaatggatgaagcagttgagtcttccgatgttgtcatgctgctgcgcattcaaaatgaacgacatcagtccgctgtcagccaggaaggctatttaaacaaatacggcttgaccgtagaacgggctgagcgtatgaagcggcatgcgatcatcatgcatcctgctccggtaaacagaggagtggagattgatgacagcttagtagaaagcgaaaaatcaagaatcttcaagcaaatgcaaaatggcgtatttatcagaatggcagtgatacagcgtgccttacaaaccaatgtgaaaagaggagaagcagcgtatgtcatatctcattaaaaacggctggatactaaacgaaaatggtgaaaaaacagaagcggatatccgagtgactggagaaaccatcaccgcaatcggcaagcttgatgcaacggataatgaaacggtaattgatgcgaaaggtttgctcgtttcacctgggtttgttgatctccacgtgcatttcagagagccgggcggagagaaaaaagaaactattgaaaccggggccaaagcggcggcacgcggcggctatactacagtagcagcaatgccgaatacgcggccggttcctgatacaaaggagcagatggaatgggtgcaaaacagaattaaagaaacatcatgcgtcagagttcttccatatgcatccattacgatcaggcaaatcggcgatgaaatgacaaactttgaagcattaaaagaagccggggcatttgcttttacagatgacggtgttggtatacagacagcaggtatgatgtatgaagcgatgaaacgggcagctgcaattgacaaagcgattgttgcacattgcgaggacaactccttaatttacggaggaagcgtacatgaggggtcattctccaaagcgaacgggctaaacggcattccttctgtgtgtgaatcggttcatattgcccgcgatgtgctgctggctgaggcggcaaactgccattatcatgtatgccatatcagcacgaaagaatctgtcagagttgtacgcgatgcgaaaaaagcgggaatcagagtgacagcagaagtgtcgccgcatcatttgctgctttgtgatgaggatatcccggggctggacacaaactataaaatgaatccgccgctccgcagtgcagaagacagagctgctttaattgaaggtcttttagacggaacaattgattttatcgcaacagaccatgcaccgcatacggaagaagaaaaaaacacagaaatgaaactggcgccattcggaattgtcggcttagaaacagcattcccgcttctttacacacactttgtcaaaaatggcagctggtcgctgaagcagttgattgactacatgacaatcaagccatgcgaagcgttcggtctcccatatggaacattacaaacggggcaagctgcggacattacgttaatcgatttagaaaaagaagcagttatagacaaagacacgtttttatcaaaaggaaaaaatacaccattcaacggcatcagctgcaccggctggccggtcgctacaattgcggcagggaagcttgcttatgaagaggggagacttgtcaaatgaagagacgattagtactggaaaacggagcggtattcgagggagaagccttcggaagcttagaacacaacatgggagaagtcgtttttaatactgggatgacaggctatcaggaaattttatctgacccttcttactgcggacagatcgtaacattaacatacccgcttatcggaaattacggcattaaccgtgatgattttgaatccattaccccttttgtaaaagggctgatcatcaaagaattatgtgagctgccttccaactggcgttcagcatacaccttagacgagtatttaaaaatgaaaaacattcccggactccaggggattgatacaaggaagctgacaagaatgatccgcacggcaggcgcgctaaaaggaacattcgcttcatctgatgaagatatcgaagcagtgctgaaaagactgaacgaaacggaattgccaagaaatcaagtatcccaagtatcagcaaaaacagcatatccgagcccgggaagaggcaaacgcatcgtcttggttgacttcggcatgaaacacgggattctaagagagctgaacaaacggaaatgtgacgtcatcgttgtgccttacaacattacagcggaagaggtgcttcagctgaaaccggacggtatcatgctttctaacggacctggagacccgaaggatgtgcctgaagcgattgaaatgattaaaggtgttcttggaaaagtgccattattcggaatatgtcttggccaccaattattcgcgctggcgtgcggggcgaatactgaaaaaatgaaattcggccacaggggctcaaaccacccggtaaaagagctggctacaggaaaagttgccttaacatctcaaaaccatggatatacagtttcgtctatcagtaaaacagaactggaagtgacgcatatcgcaattaacgacgatacgattgaagggctgaagcataaaacattgccggcatttacggttcaatatcatcccgaagcctcacctggtcctgaggatgccaaccatctatttgacagattcatcgaaatgatcgaaacaacagagaaagaaggggaagcggtatgccaaaacgcgtagacattaacaaaattttagtaatcggatctggaccgatcatcatcggccaagcagcagaatttgactatgcgggaacacaagcctgtcttgctttgaaagaagaaggctatgaagtcatccttgtcaactcaaaccctgcaacgatcatgacagatacagaaatggctgaccgggtttacatcgaaccgctcacacctgaattcctgacacgaatcatcagaaaagagcgcccggatgccattcttcctacactcggaggccaaaccggtttgaatcttgcggttgagctttctgaaagaggcgttttggcagaatgcggcgtcgaagtgcttggcacgaaactgtctgcgattcagcaagctgaagaccgtgacttgttcagaacattaatgaatgaactgaatgaaccggtgcctgaaagtgagattatccactcccttgaagaagcagaaaaattcgtcagtcaaattggattccctgtcattgtccgcccggcatatacattaggcggaacaggcggaggtatctgctcgaatgaaacagagctaaaagaaatcgttgagaacggcttgaaattaagcccggtacaccaatgtcttcttgaaaaaagcatcgccggctataaagaaatcgagtatgaagtcatgagagacagccaggatcacgccattgtcgtttgtaacatggaaaacattgatccagttggaatccatactggagacagtattgttgtcgcgccgagccaaacgctcagcgatcgcgagtatcagctcttgcggaatgtatcgttaaaactgattcgcgcgcttgggatcgaaggcggatgtaacgtccagctcgccttagatccagacagcttccaatattacattattgaagtaaatccgcgtgtcagccgttcatctgctcttgcatcaaaagcaacgggatacccgatagcaaagctcgctgctaaaattgcagtcggactttcattagatgaaatgatgaacccggtgacaggaaaaacatatgcagcatttgaacctgctcttgactatgtcgtatccaaaattccgcgctggccgtttgataaatttgaatcagcaaacagaaagcttggcacgcaaatgaaagcgacaggtgaggtcatggcaatcggccgcacgcttgaagagtcattgctgaaggcagtgcgttcgctggaagcggatgtgtatcatcttgaattgaaggacgccgctgacatttcagatgagcttcttgaaaagcgaattaaaaaggccggtgatgaacgcttattctacttagctgaagcgtacagaagaggctacacggtagaagacctccatgaattttccgctatcgatgtcttcttcttgcataagctgttcggaatcgtacagtttgaaaaagaattgaaggccaatgcgggcaatacggatgtgctgagacgggcaaaagaactcggcttctctgatcagtacattagccgcgagtggaaaatgaaagaatctgagctttacagcttgagaaaacaagcggggattgcgccggtattcaaaatggtagatacgtgcgcggcggaattcgagtcagaaacgccatacttctatagcacatacgaagaagaaaatgaatctgtcgttacagataagaaaagtgtgatggtgcttggttcgggtccgattcgaatcggtcagggtgtcgagttcgactatgcgacggttcactctgtatgggcaattaaacaagcaggctatgaagccattattgtcaacaacaacccggaaaccgtttcaacagacttcagcatctcagacaagctgtattttgaaccgcttacgattgaagatgttatgcacatcattgaccttgaacagccaatgggcgttgtcgtacagttcggcggacaaactgcgattaaccttgctgacgagctttctgcacgcggagtgaaaatccttggaacttcattagaagatttagaccgtgcagaagaccgggataaatttgaacaagcgcttggagaacttggtgttcctcagccgcttggcaaaacagcgacatcagttgatcaggcggtaagcatcgcgagtgatatcggttatccggtactggtgcgcccttcctatgtacttggcggccgggcgatggagattgtttaccatgaagaggaactgcttcattacatgaaaaatgcagtcaaaatcaatccgcagcaccctgtattaattgatagatacttgaccggaaaagaaattgaagtcgatgcagtatccgacggtgaaacagtcgtcattccgggaattatggagcacattgaacgtgcgggcgttcactccggagactcgatcgctgtttatccgcctcagtctctcacagaggacattaagaaaaaaattgaacaatacacgatcgcattggctaaagggctgaatattgtcggtttgctcaatattcaattcgtcttgtcgcaaggcgaggtgtacgtgctagaagtgaatccgagatcaagcagaaccgtaccgtttttaagcaaaattacgggtatcccaatggcgaatctcgcaacaaaaatcattcttggtcaaaagctggctgcgtttggctatacagagggccttcagcctgaacagcaaggtgtatttgtaaaagcgccggtcttctcctttgccaagctgagaagagtggacattacgttagggcctgaaatgaaatcaacaggtgaagtcatggggaaagattcgacacttgaaaaggcgctctacaaagccttgattgcttcaggtattcaaatcccgaactacggttccgtgcttttaaccgtagctgataaggacaaagaagaagggcttgccattgctaagcggttccacgcgatcggctacaacattttagcgacggaaggaacggcaggctacctgaaagaagcttccattccagcgaaggtcgtcggaaaaatcggtcaggatggcccgaacttgcttgacgtcatcagaaacggagaagcgcagtttgtcatcaatacgctgacaaaaggaaagcagccggcaagagacggttttagaatcagacgtgaatcagtagaaaatggtgttgcctgcctaacatctttagatacggcagaggcgatattgcgagtgctggaaagcatgacattccgtgctgatcaaatgccggcagtcaacacaaatcaggaggcggcagtcactatatgaaaaaagcgtatttgacagtatgttctaaccagcaaattgcagaccgggtgtttcaaatggttctgaaaggggagcttgtccaagggtttacaacccctggacagttccttcatcttaaagtgagcgaagcggttacgcctcttttgagaaggccgatcagcatcgcagacgtcaactttgaaaaaaatgaagtcaccatcatttatcgggtagatggtgaagggacaagactcttgtcactgaagcagcagggagaacttgtggatgtcctcgggcctttgggaaatggctttcctgttaatgaagttcaacccggaaagacggctttgctggtaggaggcggagtaggtgtgccgcctctccaagagctgtcgaaacgcttgattgaaaaaggggtaaatgtcatccacgttttaggattccaatcggcaaaggatgtattttacgaggaagaatgcaggcagtacggagacacgtatgtggcaacagctgacggaagctacggggaaaccggatttgtcacagatgtgattaaacggaaaaatctagagtttgatatcctcctcagctgcgggccgacaccgatgctcaaggcgttaaaacaggaatatgcccataaagaagtatatctgtccatggaggaacgaatgggctgcggaatcggcgcatgcttcgcgtgtgtgtgccatacaaacgaaagtgagacatcctatgtaaaagtatgtctcgacgggcctgtatttaaagctcaggaggtggcgctgtaatgctagaggtgaaattgccgggacttgatttgaaaaacccaatcattcctgcatcaggttgcttcggttttggaaaagaattttcacgtttttatgatttgtcttgtcttggagccatcatgattaaggctacgacaaaggagccgcgctttgggaatccgacgccgcgggtagctgagactggtgctggaatgctcaatgcgatcggtctccaaaatccggggctggatagtgtgttgcatcatgagctgccgtggcttgagcagtttgatacaccgatcattgccaatgtcgcaggttctcaagtcgatgattatgttgaagtcgcagaacatatcagcaaagcgcctaatgtccatgcacttgaattgaatatttcctgcccgaatgtgaaaacaggcggaatcgcttttggcacgaatcctgaaatggctgccgatttgacaaaagcggtgaaagaggtttcggatgtacccgtttatgtgaagctttccccgaacgtggctaatatcacagaaattgccttagcgatcgaggaagcgggagcggacggtcttacgatgatcaacacactaatcggcatgagactcgatttaaaaaccggcaaaccgatattagcgaataaaacagggggactttcaggccctgctgtgaagccggttgccattcgcatggtgtatgaagtcagccaggcggtcaacatcccgattatcggaatgggaggcgtgcaaacggctgaagatgccctggaatttcttctcgcgggagcaagcgcagtcgctgtcggaacagcaaactttgtgaatccttttgcatgtccagagattattgaacagctcccatctgttttgctccaatacggctatcaatcaattgaagaatgcatcggaaggagctggaatcatgaaaaacaacctgcccatcatcgcgcttgattttgcgtcagctgaagaaacacttgcgttcttagcgccttttcagcaagaaccgttatttgtaaaggttgggatggagctcttttatcaagaagggccatctatcgtgaaacaactaaaagaaagaaactgcgagctatttttagatctaaagcttcatgacatcccgactactgtaaacaaagcgatgaagcgccttgccagtcttggagtagacctcgtcaatgttcatgctgccgggggcaaaaaaatgatgcaggcagctctcgaaggcttagaagaaggtacgccggctgggaaaaaacgtccgtcacttatcgcggtaacccagctgacaagcacatctgaacaaatcatgaaagatgaactgctgatcgaaaagtctctgattgatacggttgtgcactacagcaaacaggcggaagaaagcggactggatggagtggtctgctctgttcatgaagcaaaagccatttaccaagcggtgtcgcctttatttctgactgtcactccggggatcagaatgtcagaggacgctgcgaatgaccaagtccgcgtagcgacgcctgccattgcaagagagaaaggttcatcagcgattgtagtaggacgctcgattacaaaagcggaagacccggtaaaagcctataaggctgtcagacttgaatgggagggaatcaaatcttgaaacaaatcatcgcaaaacatctattagacatccaagctgtatttttacgcccgaacgagccgttcacatgggcaagcggcattttatcaccgatctactgtgacaaccgccttacgctatctttcccagaggtcagaaacgatgttgcttcaggtatcagcaagcttgtcaaagatcattttcctgaagctgaaatgattgcgggaacagcaactgccggtattcctcatgctgctcttgcggctgaccgtttgaatcttccgatgtgttatgtgaggagcaagccgaaggcgcacggaaaaggcaatcagattgagggagctgtgcaagaggggcaaaaaacagttgtcattgaagacttaatttccacaggaggcagcgtgcttgaagcttgtgcagctttacaagcggccggctgtgaagtgcttggtgtcgtctcaatctttacgtacggacttcccaaagcggaggaagccttcgcaaaggcagaactgctatactactcattaactgattatgatacgctcacagaggtcgcgcttgaaaacggaaatattcattcagatgatctaaaaaagctgcaaacatggaaacgaaatcccgagtcaaaagattggtttaaaaaataaaaaataaattcaaatgatgtaaagaggcttcaaagccttgctgtacttgaaaacaggctgtgaggcctgtttttttattaatcctataaaaaaagtcgggttgacttatgttagaattgtgctaaaatttactacaaatctaaaaacttatcaagagcggctgagggactggacctatgaagcccggcaacctgcatagtttgtaaggtgctacttccagcaaaatgaattccattttgaaagataagggctgcatgctgttcctgtctttctttccgccggattgaaagttttttattttaagaggaaaaaaggctgtctgtgatatcagcagccgcgaatcacattacaattgggaaaagacaaccggcagaaagctactgtttgtttgtctccgaaaggaggaaagaagaaatgttaacgtacgataattgggaagaaccaacgattacatttccggaagacgatccttataaaggagcgctgtcagttttaaaatgggcatacggccattacggcaatcagcttgtttatgcctgcagtttcggaattgagggaatcgttctgattgacttaatttataaagtgaaaaaagacgcagagattgtgtttcttgatacaggacttcattttaaagaaacctatgaaacaattgaacgagtgaaagagcgttatccgggtcttaatatcatcctgaaaaaaccagacctcacccttgaggaacaagccgaagaacatggtgacaaactgtgggaaagagagccgaatcagtgctgctatcttagaaaggtcgttcctttaagagaggcgctttcaggacatccagcctggctttccggcctgcgccgtgatcaagggccaagccgtgccaatacgaatttcttaaacaaagatgaaaaattcaagtcagtaaaagtttgcccgcttatccattggacttggaaagacatttggagatacacatcccggaatgaactggactacaatccgcttcatgaccaaggatatccaagtattggctgtgcgccttgcactgctcccgcttttactgcagaggatttgcgctcaggcagatggaatggtatggcgaaaacagaatgcggactgcatgaataaggagctgcaaaatggaattagccgctattttatttagcttgtttttcgcgatgaatattggtgcaagcggcgctgcagcttcgatgggggttgcttacggctccggagccatcaaaaagaaaacctacgctttgatcctatgcgcagtcggtgtctttgccggggcggtcattggcggaggcgaggttgtaaaaacaatcagctccggcattattcctgagcagacgattacactgacgattgtttgcatcattattggagctgctgccctgtcgctctttactgctaatctgctcggcattcctttgtcgacaagtgaagtaacagtcggcgcggttgtcggcgtgggagtggcttataaagtattgtttgtgaacaatcttctgatcattgtgtcattttgggtttttgtcccgctgttcgctttcggcttcacctatttcgtatctaagctgtttcgttattttaagattgaagtaaaatcttctaaaaaacaaaaaatcctcggcattgttttgttagttgccggatttttcgaagcattctctgccggcatgaataacgtggcgaatgctgttggcccgttagtagctgccgatgtgcttgatgtcggaaaaggaaccttgtatggaggagcttttgttgctcttggcgcactgttattaggccggcgtgtgctagaaacaaacgggaagaaaattacgagattctccaaaggggaaggcattctcttatccggtacaggagcaggacttgtgatcatcagttctgtatttgggatgccggtgcccttggcgcaagtcacgtcatcgtctattatcggaataggcatggcaaaaaacggtccgaacgtgttccataaacaagttgttcaaacgatgctgaaggtatggatcgtatcgccgtttttatctttatcgatttcttatctgcttgtatccttgtttttaaaagcagattattattcgatctttatcatggtaagtgtgcttttagcggcgggcggtgccatcagcctgacaaaggccattcgtaaagagagacgctcagtccacgaacaaggcgggggaatctgatcattaatctgagtaattttataagttaactaggaggagatggatattatgagcttagcaccacacggaggaacattagtaaacagagtagatgaatcatatgatgtgagcggcattcaaaaagaaattgaacttgatttaatttctttcgcggatttggaattgatcggtatcggtgcatacagcccgattgaaggtttctttaatgaaaaagattacgtatctgttgtcgaaaacatgcgtctttcttccggtgttgtttggtctcttccaatcacgcttccggtcgatgcgcaaaaagcagcggaactgtcacttggtgaaacggtaaagttaacgtatgaaggagaaacatacggcgttatccaaatcgaagacctgtatgtgcctgacaaacaaaaagaagctgtcaatgtgtacaaaacagatgaacaggagcatcctggtgttaaaaagctgttcagccgcggcaatacatatgtcggcgggccgattacgttgattaaaaaagcttcaaaacagttccctgaatttacatttgaaccgttagaaacgagacgccagtttgcggaaaaaggctgggaaaccattgtcggtttccaaacaagaaaccctgttcacagagcgcatgaatacattcaaaaaacggctcttgaaacagtagacggcttgttcttgaatccgttagtaggtgaaacaaaatctgatgacattccagctgatgtacggatggaaagctaccaagtgcttcttgatcattattacccgaaagatcgcgttttccttggtgtctttttagcggcgatgcgttatgcaggcccgagggaagcaattttccacgcgcttgtcagaaagaactacggctgcacacatttcatcgtcggccgtgatcatgcaggtgtaggtgactattacggaacatacgaagcacaggagctgtttgacacatttaaacctgaagaactcgggattacgccgctgaaatttgagcacagcttcttctgtaaaaaatgcggaaatatgggaacagcgaaaacatgccctcatggcagagagcatcacgtcattttatcaggcactaaggtaagaggtatgctgagagacggtgtgctgccgcctgctgaattcagtcgaaaagaagtcgtagaagtgttaatcaaagggatgaagaaaaaagaagaagtaggcgtatcttaaggaggactggcagtgacaaatcgcgatattgtatggcatgaagcctctatcacaaaagaagagtaccagcaaaaaaacaagcataaaagctccattctctggctgacagggttaagcggctcaggcaaatcaactattgccaacgccgctgcgagagaattgtttgagcaaggctaccaagtgattgtgctggacggggataatatccgtcacggcttaaataaggatcttggtttttctgatgaagaccgaaaagaaaacatccgccgaatcggagaggtggcaaagctttttgttcagcagggaaccattgtgattactgcttttatctctcctttccgcgaggacagacaacaggttcgcgagcttgtggaagcgggcgaatttaatgaagtctacattaaatgcgaccttgatatttgtgaacaaagagatccgaaagggctttacaaaaaagcaagaaacggcgagattccgttttttacaggaattgattctccttatgaagaaccggaagctccagagctcgttcttgattcaggacaacatgaccgtgaagcgtgtaaaaatcagctgatcgagtttgttaaacaaaaattgagctgaatatgatctgctgcgttcttctcagatgccggaatgcaagcgagaacatcatcacagcgaatgctctggaagaactcgaatagatcgggggaaatacgatggggaaagtatatattgtaggagcgggtcctggtgaccctgatctgttgacaattaaagcgctgaaagccattgaaaaagctgatgtcatcttatatgacagattagtaaataaagagattttacaatatgccaaagagcaagcagacctgatctactgcgggaagcttccagattttcatacgatgaagcaggaaaccatcaatcgatttcttgtgaagtatgcgcaaaaagggaaaatggttgtcagactgaaaggcggagacccttttgtgttcggcagaggaggggaagaagcggaatgcctctctgaaaatggaattccgtttgaaatcatccccggcattacgtctggaatcgcggcagccgcttatgccgggattcctgttactcatcgggaggcgggctctaacgtcgcttttgtaacgggtcattataaaaaagaagaagattttgaggaaaagtggaaagcgctggctacaggaattgatacacttgtcatctatatgggtatcaaaaacgtgcagcagattgaaagaaaactccttgaaaacggccgggacggttctacgccggcagcctttattcattggggaacaacggacaagcaaaagtctgttttttgtacagttgacaccctttcagaaacggtgataaaagaaaacattacaaatccgagtttaattgtcattggaaatgttgtaaattatcactataagctggaatggtttgaatctgaactgaaaaaacaagatttaagcgaggcgttgtaaaaatgaaacaagcaattttatatgtcggccacggcagccgggtcaaaaaagcgcagcaagaagccacagcctttttggaaggatgcaaggcccacatctctgtgccagtacaagaaatcagctttttagagcttcaggagccggcaattgagacaggatttgaagcatgtgtgaagcaaggcgccactcatatcgcagtggtgcctctgcttcttttaacagctgcgcatgcaaaacatgatattccggaagaaattgcccgtgctgcatctcgatatccgtcagtccgcatttcatacggaaagccgatcgggattgacgaagaagtagtcaaggctgtatatcaccgaatgaaagacataggtgttccatatgaaaatgccagagtggtactcatcggaaggggaagttcagatccagatgtcaaaagagacgtaaccggtattgctaatcttcttcaggaaatggttccagtcaaggaagtcattccgtgctttttgacagcatgcggcccgaattacaaagaggttttttcagaacttaaaaaagatgacggcataacaacctttatcgttccatatttgctctttacgggtatgctgatgaatgaaatcgaacgagaggttcagaaattaaaagctcataatccgaacgtctacctctcttcctatatcggttttcatcctcatgtgaaaaacgcatttttgaaccgtgtgagagaaactgcggcaaattctgagggacaatttgattttgatggagattcatatgcttccgctgcacattagcctggaaaagaagaaggttgtgattgcggggggcggcagcatcgctctcagaaggctgaaatcggtgatttctgagggagctgatataacgctcgtcagtccggatgttgaaccggaaatcaagcaaatggcagaagagcgacgtatcaaatgggaaaaacggacaattgaaaaagaagattatctcaatgctttcttcattattgctgcgacggataatgcggcagtgaacaaagaaattgcccaatccgcttcgccttttcagcttgtcaattgtgtcagtgacgctgagcttggcaatgtatatatgccgaaaattgtaaaaagagggcatgtcactgtgtctgtttctacaagcggagccagtccaaagcacacgaaagagcttgctgaaaacgtggataagctgattgacggcgattttattgctgaagtgaacaggctttatcaggtgagaaggaagaaataagccagagcatacaaatgctctggcttttctttatgcggctcagctttttttgagcttgatgacagtatcagcatcaggcgtgacaaagacggtatgctggctgtcataggtgacgaaaccgggtttcgcgccgtttggttttttgacatgcctgatttttgtataatctacaggcactgaacttgaatctttagcttttgaaaaataagctgcaattgtcgcggcttccatgattgtttgctcatccggttcgctgcttctgatcacaacgtgggagcctggaatgtcctttgtgtgaagccagatatcgtctctggccgccgctctggtcgttaaatattcattttgacgattgttcttacccactaaaatcgtcaggcctgaggtggattcatatgtttctaacaccggattgtgcggtttttgctttttctggcctttttgctgcttagggcgtaaatatttgccctcaacaagctcttccctgatttcgctgatatcccggggagaagcggacgaaagctgctgaaacagctgatcaaaatattcgatctcttcctgtgccagcctgatttgctcctcgacaactgcgaccgaatttttcgctttctgatacttcgtgaaataggcctgtgcgttttcagaaggcgttttgtttgggtttaaaggaatcgtgattgtcgggctttcttcattataataattgatgacctcagcctgtttatcaccttttttcaacatatataaattagcggttaaaagctccccgtaaagctgaaattccttcgcgttttccgaatactccagggttttctctaattttttgattttgttggcattcttcttccgttcgttcacaacaaaacgctcaagatcctgagcctgttgcttgacccggtctcgttcagcttttccgaaataaaaacggtcgagcagttcgcttaatgaatcaaaacggcgcgcttcgccctttagatgagtcagctccagcaggtaaaaatattcctttccgtttacagtcgtaatgttgggaatgaaacggtgctctttcacttcagcaaacagtgccagcaacgcttttggcagtgtgactttgttggcaaggcctgctctgtgaaccgcttctttggcgaaaagcggagacacgcctgaaaagtggtcgacaatttgtttatcaagccttccttcttgaaagctgaggtgacgcaaaatatcatcttctgacgcctcaagaggcgatattttgtcctgagcaggcggaagcttataatcttggccgggcagtactgtacggtagctgttcattgacggtgataagtgcttaagtccgtcgatgatcacattttctgctgcgtcagtcaaaatgatattgctgtggcggcccataatttctacataaagctttcgtacggtttcatcgccaatttcgtttcggcttttgatatgaaaaatcataatgcggtctaagcccgcttgttcaattttctcaatgaatccgccttcgatatgctttctcagcaacatgcaaaacattggcggttcgcttggattttcataagcttgtgccgtgatatgcacccgtgaatagctcggatgtgccgataataatagtttttggttttttccattggcacggatgtggaaaatcacatcgtgcttatatggctgatggacttttgtaattcgtccgcccattattttctcgttaagttcgtgtgtcattccgtatgtaaacatgccatcaaacgacatatgcaatacaccctctcattcttcctgcattcgataattatagcatgaaatgggacgagtcagaataagcatgcttatagagtgatatctctataagagagcaggggagtggacgagcggaatgaagtttcatgaaatgggacaaacagatttactagaggcaaccaatacgtccatgaaacaaggattaacagaaaaagaggtaaaaaaacgccttgacaagcatggaccaaacgagctgcaagaaggggaaaaaacttcagcgcttctcttgtttttcgcgcagttcaaagattttatggtgcttgtgcttctggcggcaacgttaatctcaggatttcttggtgaatatgtagatgcggttgcgattattgcgattgtgtttgtgaatggcatacttggtttctttcaagaaaggcgtgctgagcaatctcttcaggctttaaaagagctttcaacaccgcatgtcatggcactcagagaaggaagctggacaaagattccttctaaggaactggtgccgggtgatattgtgaaatttacgagcggggacagaattggcgcagacgttcgaattgttgaagcaagaagccttgaaatagaagaatcagcgctgaccggggaatcaatcccggttgtgaagcatgctgataaattgaaaaaaccggatgtttcacttggcgatattaccaatatggcatttatgggtacgattgtgacccgcggcagcggtgtgggggttgtcgtcgggacaggaatgaatacggctatggggaaaattgccgacatgcttgaatcggcagggacattgtcaaccccgctgcaaagaagactggagcagctcgggaagattttgattgttgttgcattgcttctgaccgtacttgtcgttgctgtcggtgttattcaggggcatgatctgtacagtatgtttttagcaggtgtctcgttagcggtagcagctattccggaggggctgccggcgattgtgacagtggcgctatcgcttggtgtacagcggatgattaaacaaaaatccattgttagaaagcttcctgctgttgaaacgcttgggtgtgcgtctatcatttgttcagataaaacagggacaatgacccaaaacaaaatgacggtgacacatgtctggtccggagggaaaacatggagagtggcaggggccggctatgaaccgaaaggaagcttcacactaaacgaaaaagagatcagtgtcaatgaacataagccgcttcagcagatgcttctgttcggagcgctttgtaacaactccaatatcgagaaaagagacggcgaatatgtgcttgacggagatccgacagagggagcgctgctcaccgcggcaagaaaaggcggtttttcaaaggagtttgttgaatcaaactaccgggtggtcgaagaatttccgtttgattctgcacggaaaatgatgactgtcatcgtagaggatcaagacagaaagcgctatatcattacaaaaggtgcaccggatgtactgatgcagcgatcttcccgtatttattatgacggctcagcggctcttttttcaaatgaaagaaaagcagaaacagaggcggtattaagacatttggcatcacaggcgctcagaacgatagcggtcgcctacaggccgataaaagcaggcgaaacaccgtcaatggagcaggcggaaaaagatctgaccatgcttggcctttcaggtatcattgaccccccgcggccggaagtcagacaggcgataaaagaatgccgtgaagcaggaattaagaccgttatgattacaggtgatcatgtagaaaccgctaaagcgatagcgaaagacttgcgcctccttccgaaaagcggcaaaatcatggacggcaagatgctgaatgaactttctgaagaagagctttctcatgtggtggaggatgtatatgtatttgcccgcgtttcccctgaacataaactaaaaattgtaaaagcctatcaggagaacgggcatattgtggcgatgacgggagacggcgtcaatgatgctcctgccattaaacaagctgatatcggcgtctctatgggcattaccgggacagatgtggccaaagaagcatcatctcttgttctcgtggatgataattttgcgacgattaaatcagcgataaaagaaggcaggaacatctacgaaaatatcaggaagtttatcagatacctgttggcgtctaacgtcggagaaattcttgtcatgctgtttgcgatgctgctggcccttcctttaccgctcgttccgattcagattttgtgggtcaacttggtgacggacggattgccggcgatggcgctcggcatggatcagccggaaggagacgtcatgaagcgcaagccccgtcatccgaaagaaggggtatttgcccgcaagctaggatggaaggtcgtttccagaggatttttaatcggagttgccactattttagcgtttatcattgtgtaccaccgcaatccggaaaacttggcttatgcccagacgatcgcgtttgccacattggtgctcgctcagcttattcacgtgtttgactgccgcagcgaaacttctgttttctctagaaatccgtttcaaaacctgtatttaatcggcgcggtattgtcatccattttgctgatgcttgtagtaatctactatccgccgcttcagccgattttccatactgtagccatcacgccgggggactggatgctcgtcatcggtatgtccgccatccctacttttttgctggcggggtcacttttaacaagaaaaaaataaattcatatgatataatcttaggggtaatagcgtgtctattgcccttttattatgagaacagggaagaattgggtgttttaaaatgatacgaagtatgacaggcttcggcagtgcaagcaaaacacaagacgatctctctgtaagcgttgaacttaaatctgtgaactacagatttaaagaagtgaacgctcgtttgccaaggcctttgctatattttgaagataagctgaaacagaccattctgcagcatattcagcgcggaagaattgagcttttcgtatccgttgacagcgatatgcttgttgagaaaaggcttgaaattgattggccgctgctcgatgagtttgtcgcagccgcgagaggtatgaagaaacggtatcaattgtctgcagagcccgatgtaatggatttctttaagcttgatcatgtcgtccaggttcatgaagaacagacgcaaaatgacaagctggaggcgttgatcatcgatgctgcagaagaagcggtaaaaggtctctgtgaaatgcgtgaaaaagaggggctgctcttagcgaaagactgcctgatgcatattgatcagcttgaagagctggtgagagaaactgaattgctggctgcagatgtcgtatctcgttaccgggaacggctgtacgccagaatcaaagaatggactgaagacgtattagacgagagccggcttgtaacagaatgcgctatttttgcagaccgctctgatatcactgaagagattacaaggctgaagagccacttcgcccagtttcgtgatatattagctagtggcggagctgtcgggcgcaaactcgactttcttgttcaggagctcaatcgggaagcaaatacgattggctcaaaagcaaatgatcatcagatcacaaagcttgtcgttgaaatgaaaagttctattgaaaaaataaaagaacaagtgcaaaatatagaatagtgactgtgcgtattgtttacagacggtcttactaggctaaactagagacgtctattttacagggggaacgtagaagatgacgattaaactgattaatatcggatttggcaatatcatctccgccaatcggatgatttcgattgtcagcccggagtctgcgccaatcaaacggatgattcaggatgcaagagaccgcggaatgctaattgacgctacatacggacgaagaacccgtgcagttgtcgtcatggatagtgatcacattatcttatctgccgtccagcctgagacagttgcacacagactttctgttaaagaagaaattatggatgaagggcaggggtaattgccgcatgaaagaaagagggttattaatcgttctctcaggtccctcaggagttggtaaaggaacggttcgacaagcgatcttttcgcaggaagacacaaaatttgaatattcgatttcagtaaccacaagaagtccaagagagggcgaagtgaacggagtcgattattttttcaaaacaagagacgaattcgagcaaatgattgcggacaacaagctgcttgaatgggcagagtatgtcggcaattattacggcacgccagtcgattatgttgaacagacgcttcaagatggaaaagacgtctttttagaaattgaagttcaaggggctcttcaagtgagaaatgctttcccggaaggcctatttattttccttgcgcctccaagcctttctgaactgaaaaacagaatcgtgacacgaggcacagaaacagacgctctgattgaaaatcgaatgaaagccgcaaaagctgagatcgaaatgatggatgcttatgactatgtcgttgaaaacgataatgtcgaaacggcttgcgataaaatcaaagcaatcgttcttgctgaacatttgaagcgtgaacgcgttgcaccaagatataagaaaatgctggaggttgaataatcaatgttagatccgtcaattgattctttaatgaataaattagattcaaaatatacgctggtgactgtttctgcgagacgcgcacgtgaaatgcaaatcaaaaaagaccaaatgattgaacatacgatttcacacaaatatgtaggcaaagctttagaagaaattgatgcaggcctgctttcgtttgaaaaggaagaccgcgaatagtagcacaagtagcaacctatatcagatgtaggttgttatttttttccgtgcggttttgtaaagtgcagagggggagaattcattgctaaacaatcgaaatgtgttactttgcgtgagcggaggcatcgctgtttataaagcctgtgcgttaacgagcaagctggttcaggcaggagcaaatgtcaaagtgattatgactgaatccgcttgccgattcgtttcaccgctgacatttcaggcattgagccgccacgaagtctatacagatacatttaaagaacaaaatccaagcgttatttctcatattgatgccgcagactgggccgacttgattattgtagcgccggctacggctaatgtgattggaaaactggcaaacggcatcgctgatgatatgctgacgacaacattgttggcagcaacggctcccgtttggatcgcgccggcgatgaacgttcatatgtatgaccacccggcagtcaaacgaaacatttctgttctttatcaggacggttatcgttttattgagccaagtgagggctatttagcatgcggttacgtaggaaaaggcagattggaagagccggaaaacatcgtaaagctggccgaaaaacattttgctgaagaaacatccgctcctttagaaggcaagcatgtggtcattacagccggtccaacgcgggaagcgattgatcctgtccggttttttaccaataaatcgacgggcaaaatgggctacgcactagcggaggctgctgttcagctcggcgcacgggtaaccttaatttctgggcctgtttcacttgatcagcctaaaggccttgctgagtttatccctgttcaatcggctgcggatatgcgcgaagctgtgctctctgtgtatgacgcaagcgatatagtcattaaaacagctgcggtagccgattttacgccgaaaacagtatttgaccataaaatgaaaaaacaagacggcggcatgaccttagaactgaaaagaacagtcgatattttgaaagaattgggcgagaaaaagaaagagcagattttggtcggatttgccgccgaaacacaagacattgaacactatgcacgtaaaaagctcgccgctaaaaaccttgatttgattgtggcaaatgatgtgaaagcaaatggggccggttttggtgctgatacgaatatcgtgacaatctttttcaaagacgggcataaacgcgaactcccgatcatgtctaagctcgatgtttcttttgaggtccttcaggagatcgcagccctctcaaaacaaaccggagagcgctcatgaattttgcagaagtcatcgttgatgtcagcaccaaaaatatagacaggccttttgattataaaatcccagaccatctcaagggcatgatcaaaacggggatgcgggtcattgttccgtttggcccccgtaagattcaagggtttgtgacagcagtcaaagaagcatctgacctatcgggaaaatctgtcaaggaagtagaggatttattagatcttacacctgttctgacagaggagcttatgattctgtcatcatggctgtcagacaaaacgctgtcttttaaaataacggcgcttcaagcaatgctgcctgccgccttaaaggcgaaatatgaaaaagaattaaaaattgcacacggagccgatcttccgccgcaagtggaacggctgttttctgaaacaaagacgctgctgtattcagatatacccgatcatgagacgctgaaactgattcaaaggcatgttcaaaaaggggacattgacgtgacgtataaagtcgcgcaaaaaaccaataaaaaaatggtcaggcatattcaggcaaatgcgagtaaagaagagcttgctaagcaggctgagggattgtcccgccaagcagcaaaacagcaggcgattcttcactttctcatctctgagccggaaggtgtgaaaattcctgcggcggaattgtgcaaaaaaacggatacgagctctgcaaccattaaaacccttatccaaaaagggcttttgaaggaaagctatgaagaggtttacagagatccctatcaggacaaaatgttcaaaaaaacagagcccctgccgctgacagacgaacagagggctgccttcgagcccatacgcgagacattggacagcgatgagcataaagtgttcctccttcacggcgtgacaggaagcggaaaaaccgaaatttatctgcaatcaattgaaaaagtactggcgaaaggaaaagaagccatcgtcctcgtaccggaaatatcgctgacgccgcaaatggtcaaccgcttcaagggccgcttcggctcccaggtggcagtcatgcacagcggtttatccacaggagaaaaatatgacgagtggcgtaaaatccaccggaaggaagtacggcttgtcgtcggtgccagatccgccatttttgctccgtttgaaaatctcggaatgataatcatcgatgaagagcacgagtcttcctataaacaggaagaaatgccgcgctatcatgcgaaagaggtggcaatcaagcgggctgagcatcacagctgcccggttgtattagggagtgctacgccgacattagaatcatatgctagagcgcaaaagggcgtatacgagcttctttcactgaagcaccgtgttaaccatcgggtgatgcccgaggtttcgcttgtcgatatgagagaggagcttagaaacggcaatcgctcgatgttttcagttgaattgatggaaaagcttgaagaaacgattgccaagggtgagcaggcggtgctgtttttaaataagaggggctactcttcctttgtgatgtgcagggattgcggctatgtcccgcaatgcccgcactgcgacatttccatgacgtatcatcgttacggccaaaggctgaaatgccattattgcggacatgaagagcctgttccgcacacttgtcctgaatgcgcaagcgagcatatccgctttttcggaacgggaacacagcgagtggaggaagagctgacaaaagtgctgccaagtgcgagagtgattcggatggatgttgacacgacatcacggaaaggcgcccatgaaaaattactgtcagctttcggagaaggaaaagcggatattcttctcggaacgcaaatgatcgcgaaagggcttgattttccgaatgtcacgcttgtcggagtgttaagtgctgatacaacacttcatattcctgatttcagatcggctgaaaaaacatttcagctgttaacgcaagtcagcggccgggcaggcaggcatgaaaagcccggccatgtcatcattcaaacgtatacaccgtctcattacagtatccagctgacgaaaacacacgattatgaaacgttctatcagcatgaaatggcgcacaggagagagcaatcctatccgccatactactatttggctcttgtgactgtttctcatgaggaagtggcgaaagcagcggttacagctgaaaaaatcgctcattttttgaaagcaaactgcggagctgacacgaaaattctcggaccaagcgcgtcgccgatagccaggatcaaagatagatatcgctatcaatgcgtgataaaatacaaacaggaaacccagttatccgctttattgaagaagatactggaacattataaacgcgaaattgaacaaaaacatgtaatgatttcaattgatatgaatccttatatgatgatgtaagatctcacgtcttggagggtaacaaattggcagtaaaaaaggtcgtcacacatcctgcggaggttttggaaacacctgcggaaaccgtgactgtttttgataaaaagctaaaaaaactgcttgatgatatgtacgacaccatgcttgaaatggatggtgtcggactggcagcgccgcaaatcggcattttaaaaagagcggccgtcgtagatatcggggatgacagagggagaattgatctcgttaatcctgaaattttagaaaaaagcggcgagcaaaccggaattgaaggatgcttgagctttcctaacgtctatggtgatgtcacacgtgccgattatgtcaaagtgcgtgcgtttaaccgtcagggaaaaccgttcattctggaagcgcgaggctttttagcaagagccgtgcagcatgaaatggaccacttagacggtgtgctgtttacatctaaaataagtaaatactatacagaagatgaactagcggatatggaaggatgatttgatgacgagaatcgtatttatgggaacgccggatttttcagttcctgttttaagaaccctgatagaggacggatatgaagtagtgggggtcgtcacacagccggaccgtccgaagggcagaaaaaaagtactgacacctcctccggtaaaggaagaggcattgcgccacggcatcccggttcttcagccggaaaaagtcagattgacagaagaaattgaaaaagtgctggcattaaagcctgacctgattgtaacggcggcattcggacaaattttgcctaaagagcttctcgacagtccaaaatacggctgcattaacgttcacgcatcccttttgccggaactgcgcggcggtgctccgatccattattccattctgcagggaaagaagaaaaccgggattaccattatgtatatggtagaaaaattggatgcgggcgatatgatctcaaaagtggaagtggacattgaagaaaccgacaatgtcggaacactgcacgataaattaagcgttgctggcgcgaagctattgtctgaaacggttccaaacgttattgccggcagcatatcacctgaaaagcaggatgaagagaaagcgacgtacgcgcctaacattaaaagagagcaagagctgctcgactggtccagaacgggcgaagagctttacaaccagatccgcggcttaaatccatggcctgttgcttatacgactctaaacggacaaaacttgaaaatatgggcgtcgaaaaaaatagcggcaccaacaacagctgagcccggcacagtcgttgcagttgaaaaggaaggaattatcgttgcctcaggtaacgagacggctctgttattaaccgaactccagccggcaggcaaaaaacgaatgaaaggcgaagactttgtgcgaggcgctcatgttgaagccggtgatgtgttaggagtaaacaatgaaaaaaactagtgttcgtgacatcgcccttgaggcgctgatcaaattagaacaaaaccaggcatacagcaacctgctgctgaaatcggtcattaaatcaaatgaactgagtgatcaggacagagggcttttgactgaacttgtctatggtacattacaaaataagatcgcgcttgattatatgcttaaaccgtttatcaataagcctcaaaaggtaaagccgtgggtgattcagcttcttcgcctatccttatatcaaatggagtatttggagaagattccagacagggcagccattcatgaagcggttgagattgctaaaatccgtggacacaaaggcattgcttcatttgtcaacggcgtgctccgttctattcagcgcgaaggtgttccatcctttgacgcgatcgaagatcctgtccgccggctggcgacagaaacaagccatccggaatggcttgtgaaagagtgggcggatgcgtatggatttgaagctgcggaaaagatttgccgcatccatctcattccgccgaaacagacgctgcgtgtcaatcaaatgaaagcagacagagctgagctgcttgaccaaatggctgctgagggaatcgaagttgaaaaaagcgacctcgctgaagatgctgtgaagctcttaaagggaacaattgccggaactcatttcttccaaaacggcgaagtttctatccaggatgagagctccatgctcgtcgcccgcgcccttgatcctaagtcagatgaaacagtgcttgacgcgtgtgcggcgcctggcggaaaatcggctcatatcgcagaattaatgaagaacaaggggagcgttacgtcgcttgatcttcacaaacataaagtgaagctgatcaaagaagcggcagatcggcttggcctgacaatcattcatgcggaaacaatggatgctagaaaagcgggggaaacgtttgaaaacgaacagtttgaccgaatattggtcgatgccccgtgctcaggtttcggtgttatcagaagaaagccggacatgaaatacacgaaaaaacctgacgacagcgcccgtctagctgaaatccagctgtcgatcttgagggaaatcgcaccattagtaaaaaaaggtggcactcttgtctacagtacgtgtacaatggaccggacagaaaatgatgaagtaatacatgcgtttatacaagaacatcctgattttgaacccgatttgtctcttgaaaagcggctgcctgaaaaggtgagaccctttgttcgggatggaaggcttcaaatccttcctcattatttcggaacagatggtttctttatttgcagcatgagaaagaagggataagcaatggcagaacttaataaaacaaaagtaagaaaagaattgcggacagagcgtccgtctatttattcttttgaattagatgaaatcaaacaatggctgacagacaatggagagaaaccgttccgtgcagcccagatctttgaatggctatatgaaaaacgcgtatcttcttttgaagatatgacaaacctctcaaaggatctgcgtgagaaattaaacactcactttgtgttaacaacgctgaaaacggctgttaaacaaacctctcaagacggtacgatgaagtttttgtttgagcttcatgacggttataccatcgaaaccgttttaatgagacacgagtatggcaattctgtatgtgtaacgacacaagtcggctgccgtattggctgcacattctgcgcgtcaacgcttggaggcttaaaacgaaaccttgaagcaggggaaattgtcgctcaagtagtcaaagtgcaaaaagctcttgatgaaacggatgaacgcgtcagctctgtcgtgatcatgggaatcggcgaaccttttgataactttaacgaaatgctcgctttcttgaaaatcattaaccatgacaagggcctgaatatcggtgctcgccatattacggtctctacgagtgggatcatcccgaaaatttacgaatttgctgatcagcaaatgcagattaactttgcaatttctctgcacgcgccgaacacagaaatcagaagccgtttgatgccgattaacagagcatataaactgcctgatctaatggaagccgttaaatattatattaataaaacgggacgccgcatcagctttgaatacgggctgttcggaggcgtaaacgaccaggtggaacacgccgaagagcttgccgacttgctggaaggagtcaaatgccacgtgaacttgattccggtaaactacgtgcctgaacgggactatgtgcgcacaccgcgtgatcagatttttgcttttgaaaaaacgctgaaatcccgcggagtaaatgtcacaatccgaagagagcaaggacatgacattgacgcagcctgcggtcagcttcgcgcgaaggagcgtcaagacgagacgaggtgatgagggttgttaacagccttaaaaacagatacaggaaaaatccgccagcataatgaagatgatgcggggatattcaaggggaaagatgaatttatattagcggttgtcgctgatggcatgggcggccatcttgctggagatgttgcgagcaagatggctgtgaaagccatgggggagaaatggaatgaagcagagactattccaactgcgccctcggaatgtgaaaaatggctcattgaacagattctttcggtaaacagcaaaatatacgatcacgctcaagcccacgaagaatgccaaggcatggggacgacgattgtatgtgcgctttttacggggaaaacggtttctgttgcccatatcggagacagcagatgctatttgcttcaggacgatgatttcgttcaagtgacagaagaccattcgcttgtaaatgaactggttcgcactggagagatttccagagaagacgctgaacatcatccgcgaaaaaatgtgttgacgaaggcgcttggaacagaccagtcagtcagcattgacacccgttcctttgatatagaacccggagacaaactgcttctatgttctgacggactgacgaataaagtggaaggcactgagttaaaagacatcctgcaaagcgattcagctcctcaggaaaaagtaaacctgcttgtggacaaagccaatcagaatggcggagaagacaacataacagcagttttgcttgagcttgctttacaagttgaagagggtgaagatcagtgctaatcggcaagcggatcagcgggcgttaccaaattctccgcgttataggcggcgggggaatggccaacgtgtatttagctgaggatatcattctagaccgtgaagtcgcaattaaaatcctgcggtttgactatgcaaatgacaatgaatttatcaggcgtttccgcagagaagcccaatccgcatcaagcctcgatcacccgaatattgtcagcatttatgatttgggcgaggaagatgatatttattatattgtcatggaatacgttgaaggcatgacgcttaaagaatacataacagcaaatgggccgcttcaccctaaagaagcgctgaacatcatggagcaaattgtctcagccatcgctcatgcccatcaaaaccagattgttcacagagacatcaagccgcataacattttgattgatcatatgggaaatatcaaagtaacggattttggaattgcgacggcactaagttcgaccacaatcacccataccaattcagttctgggctcggtccattacttatcacctgaacaggcccggggcggcttagccacaaaaaaatcggatatttatgcgcttggaatcgttctatttgagcttttaaccggccgtattccgtttgatggagagtcagcagtcagcatcgccttgaagcatcttcaagcggaaactccttcggcaaaaaggtggaatccatcggtcccccaaagcgttgaaaacatcatactcaaggcaactgccaaagatccttttcatcgctacgaaacggctgaagacatggaagcagacataaaaacagcttttgatgccgacagactcaatgaaaagagatttacgattcaagaagatgaagaaatgacaaaagcgatacctatcattaaagatgaagaacttgctaaagctgctggcgaaaaagaagctgaagtgacaaccgcacaagaaaacaaaacaaagaagaacggcaaaagaaaaaagtggccgtgggttttgctcacgatatgcctcgtttttatcacagctggaattcttgctgtcactgtttttccgtcgcttttcatgcctaaggatgtcaaaatacctgatgtctccggaatggaatacgaaaaagccgcagggctcttggaaaaagaaggtttacaggttgattccgaggtgttggaaatctcagatgaaaaaattgaagagggcctgatggtaaaaacggatcctaaagcggataccacagtcaaagaaggcgccacggtcaccctttataagagcaccggaaaagcaaaaacggagatcggtgatgtgacaggccaaacggtcgaccaggcaaaaaaagcgttgaaggaccaagggtttaaacatgtaacggtaaatgaagtgaatgacgagaaaaacgcgggcactgtcattgaccaaaatccttcagcagggactgagcttgtcccgagtgaagatcaagtcaaacttacagtcagtatcggacccgaagacattacgcttagagacttgaaaacctacagtaaagaagcagcgtctggatatctggaagacaacggattgaagcttgtagaaaaagaagcatactcagatgatgttccagaaggacaggttgtcaaacaaaaaccagcagcaggtacggcagtaaagccgggaaacgaagttgaagtgacattctctctcggaccagagaaaaaacctgcgaaaacagtgaaagaaaaggtcaagatcccctacgaaccagaaaatgaaggggacgagcttcaagtgcaaatcgcggttgacgatgcggatcacagcatctctgacacttacgaagaatttaagataaaagagccgactgaacgaacgatcgaactaaagattgaacccggccaaaaagggtactatcaagtaatggtaaacaataaagttgtcagctacaaaaccattgagtatccaaaagatgaataacaaggagggaaaatatgcctgagggcaaaattattaaggcgctaagcggcttttactatgtactggatgaatcagaggattcagataaagtaatacaatgcagaggaagaggcattttcagaaaaaacaaaattacccctcttgtcggtgattacgttgtgtatcaagctgaaaatgacaaagaaggatatctaatggaaattaaagaaagaaccaacgagcttatcaggccgccaatttgcaacgttgatcaagcggtcctggttttctcagcggttcagccttctttcagcacggcattgctcgaccgcttcctggttctcgttgaggccaatgatattcagccgattatatgcattactaaaatggatctgattgaagatcaagatacagaagatacgatacaagcctatgcagaagactatcggaatattggttatgacgtataccttacctcctctaaggaccaagacagtttaacggacatcatcccgcattttcaggataaaacaacggtatttgccggtcagtccggtgttgggaaatcctcgcttctcaacgcgatcagtccggagcttggattaagaacaaacgagatttctgagcatttgggccgcgggaaacacacaacccgccacgtggagctgattcatacgtccggaggtttggttgcagatacaccaggattcagctcgcttgaatttacagacattgaggaagaagagctgggctataccttccctgatatcagagaaaaaagctcttcatgcaaatttagaggctgtttacatctgaaagagccgaaatgcgcggtgaaacaagctgttgaagacggagaattaaagcagtatcgctatgaccattatgttgaatttatgacggagattaaagacagaaagccgaggtattagcataatgataaaggttgcaccatctattctttccgctgattttgccgctttaggcaatgagattaaagatgtagaaaaaggcggagccgattgtattcatattgatgttatggacggccgttttgtcccgaatatcacaatcggtccgctgattgtagaagcggtccggccggtaacggatctgccgcttgatgtccatttaatgatagaagagccggatcgttatatcccggcttttgcgaaagcaggcgcagatatcctgtctgtgcatgctgaggcatgtccgcacctgcaccgtaccatccagctcattaaagagcaaggagtgaaggccggagtagttctaaacccgcatacccctgtacaagtcatcgaacatgttttcgacgatcttgatcttgttcttttaatgacggtgaacccgggcttcggcgggcagaaatttattcattcagtccttcctaaaataaaagaggttaagcgaatggcggatgaaaaaggaaaaaaagatctgttcattgaagtagacggcggcgtcaacaaagaaaccgctccgctcgtcattgaagcgggcgcaaatttactcgttgccggttcagctgtttatggccagtctgaccgcaaaaaagcaatttctgaaatcagaggaagtaaataagcagctttagaaaagagctgggcatacaatagcctaagctctttttcctgtatgcagagaaaggaatcagagatgaaaacaattaatatcgttgcgggaggcccgaaaaatctcattcccgatctaaccggctatacggatgaacacacgctttggatcggtgttgacaaaggcaccgtcactctcttagatgccgggatcattcctgttgaagccttcggagattttgacagcataacggagcaagaacgccggcgaatagaaaaagccgctcccgcccttcatgtgtatcaagcagaaaaagatcaaacagatttagacctcgcccttgattgggcgctggaaaagcagccggatattattcagattttcggcattacaggcggcagagctgatcattttttaggaaacattcagctactgtatagaggtgtaaaaacgaacataaaaattaggctgatagacaaacaaaatcatattcaaatgttccctcctggtgaatatgatattgagaaggatgaaaataagcgatatatctccttcataccgttttccgaagacatacatgagctgaccctgaccggttttaaatatcctctaaataattgtcatattacgctcggttcaacactatgtattagtaacgaactcattcattcacgaggtactttttcgtttgcaaaaggcatattaataatgataagaagcacggattaagcatgtgctttcattcaattgctaaaaacaatgaacaaggcggttacgggacgttataggaggggacaaaaatgaaattttacaccattaaattgccgaagtttttaggaggaattgtccgggcgatgctgggctcatttagaaaagattaatgcccaggggttcaaagccctctttcaccacataaaaacgcctgccacatatcggggcaggcgttcattttgttatacacgctcaactttaccggatttcaaagctcgagcagatacatatacttttttaggttttccgttcacaaggatacgaaccttttgaagattcgcgccccaagtgcgcttagaagcgttcattgcgtgagaacggttattcccagctgttgtttttttacctgtgataacgcatttacgtgccatttgtttccctcctcacttgcacaaaacatctactttttaacattcatataatcttagatgctttcgatatggatactttaaataatttaccacagctaaaaaacgtttgcaactattgtttcatcatctttcaagaaaattcacttgacatcttgcggaaacagcagcgctatagtatatgtagaggtacggccagcgattattgcctggtcttttcataatggaaaccatatagtagaatagctgtaactctatgcattcgaaggaggaactagtgtgtccattgaattaagaacgaagtacggacagattgatatatctaatgaagtcatcgcgatggttgcaggaggcgcggcggttgactgttacggcattgtcggtatggcctctaaaaaccagattaaagacggactgactgaaatccttcggaaagagaatttcagcaggggtgtccaagttcgccaagaaggagaacagatacatatcgacatgtatatcattgtcagctacggcacgaaaatttctgaagtggcacataatgtccaaacaaaagtaaagtacacagtaaatcaaaccatcggactggcagtggattctgtcaatatttatgtccaaggcgtacgagtgacgaacccgtagttaggaggagtaggattgtctatcagaacattagacggcagaacctttgccgagatgattcttgcgggagcgcagaatctgtctcaaaacgccagtgcagttgatgcactgaacgtgtttccggtgccggacggtgatacgggaacaaatatgaacctgtcgatgacttccggagcaagagaagttgaacaaatggatacggatgatatcgggaaggtgggctccgcgttatctaaagggctgctcatgggagcacgcggaaattcaggagttatcctatcccaattgttccgcggatttagcaaaagcattgaaacgaaaaaagaaattaatgcacttgagtttgccgctgcgctgcaagcaggtgtagacatggcgtataaagctgtcatgaaacctgtagagggcaccattttaacagttgcaaaagacgctgcaaaaaaagcgatgatcttagcagaaaaagaaaccgatatcactgcgctgatgattgcagtgacagaagaagcagaggcgtctttaaaccgcacccctgaattgctacctgtcctaaaggaagtaggagttgtcgatagcgggggcaaaggcctgctctgtgtgtatgaaggtttccttgcttcattaaaaggtgaaactgtacctcagaaagcagttcttccgtcacttgacgacatggtcagcgcagagcatcacaagagcgcgcaaagcatgatgaataccgaagatattgaatttggattctgtaccgaagtgatggttaggcttgatcagacaaaaagagagttcgacgaaggcacgttcaggcaagacctcagccagttcggagattctctgcttgtgattgcggatgaatcgctggcgaaggttcatattcatgctgaagagccgggaaacgtgttaaactacgcccagcattacggtgaattgatcaaaataaaaatagaaaatatgagagaacagcatacctctatcatcagtcaagaaagcaaacctgcagacaacgaaataccgccggcaaagcagccgtatggcattgtgactgtggcgatgggagaaggaatttcagacctattcaaaagcattggcgcttctgttgtgattgaaggcggccagaccatgaacccaagcactgaggatattgttgatgccgtgaagtctgtaaatgcagatacggtatttatcctgcctaacaactccaacattatcatggctgctaaccaagcggccagcgtagtggatgaacaggtttttgtcattcctgctaaaacggttccgcaagggatgtcagccctgctggcttttaacccggatcaagaagctgaagcgaacgaggccaatatgctaagcgccattcagcaagtaaaaagcggacaggtgacgttctcagtcagagatactcatattgacggtaaagatattaaaaaaggcgactttatgggcattctgaatggaacgattatcggcacttctgaaaatcagctgtcagccgcgaaaatgctgctgtcagaaatgatcggagaagatgatgaaatcgtgaccattctatatggtgaggatgcgtctcaggaagaagctgagcagcttgaagcgtttctcagtgaaaagtacgaggagattgaggttgagatccacaatgggaaacagcctctgtattcgtatatagtttctgcagaatagaagggcaatttgcccttctattcttatgtctgcttttaagtgcggcagcgctgtaacgcgcccgcttgccattttatatctgatcaattagtctagaagcaaagcgctaataagctctggttcataaggaggaatagcatgaaatacagaagcgtttttgatattatcggcccggttatgatcggtccgtccagctctcatacagcgggagctgctagaatcgggagagtggccagaagtttatttggcagagagcctgagcgcatcattgtatctttttacggctcgtttgcggaaacgtataagggccacggcacagatgtcgcgattatcggcggattgcttgattttgatacattcgatgaacggattaaaaccgctatacaaattgcagaagctaaaggaattgatatagagtttcgggtagaagacgcagtcccggtccatccgaacacagcaaaaatcaccatttctgatgaaaagggtgagcttgaactgacgggtatttcgattggcggaggaaagattgaaatcacagaattgaatggttttgagctccggctgtcaggaaatcatccggccatattagttgttcataatgacaagtttggcacaattgccggtgttgccaatgttctggcgaaattttcaatcaacgtaggacatatggaagtagcccggaaagatatcggccagcttgcgctgatgacaatagaggtcgaccaaaatattgacgaccacattctcgacgagctgtcgaaactgccgaatattattcaagtgacaaagattgctgactagcgaaaagggtcaggaggagccagttatgtttcgtaatgtaaaagaattaattgagattactaaagaaaaacaaatattgatctctgatgtgatgatagctcaagagatggaagtaacagaaaaaacaaaagaggacatttttcagcagatggatcataacctgtctgttatggaagcggcggttcagaaaggactcgagggagttacgagccaaacgggcttaacaggcggagatgccgttaaattgcaggcctatattcgatcaggaaaaagcctgtctggcccgctgattttagatgctgtatcgaaagccgttgcaacaaatgaagtaaatgcagccatgggaaccatctgtgcgacaccgactgcaggttctgccggtgtggtgcccggtacgttatttgctgtaaaagaaaagctgaatccaacaagagaacaaatgatccgctttttgtttacagccggggctttcggatttgtcgtggccaataacgcaagcatttccggcgccgccggaggatgtcaggcagaggttggatcagcttcaggcatggcggctgcggctattgttgaaatggcaggaggaacacccgaacaaagcgcggaagccatggccattacattaaaaaatatgctaggcctcgtgtgcgaccctgttgcagggcttgttgaggtgccttgcgtgaaacggaatgcgatgggcgcgtcaaatgcaatgattgccgctgatatggcattggcgggcattacaagccgtattccatgtgatgaggttatcgatgccatgtataaaataggccaaacgatgccaactgcacttagagaaacaggccagggcggtttagcggcaacaccgacaggaagagaattagagaaaaaaattttcggaggagcgctaggttcacgtgaaacaacatcagcaaactagtatagctaacattaagggtattgggccggaaacagaaaaaacattacacgaactcggtatttatgacatttctgatcttctgaattatttcccttatcgctatgatgactacgagctgagggatttagaagaagtaaagcatgatgaaagagtcacagtcgaagggaaggttcattcagagccttctcttacctattacggaaaaaaacgaaacaggctgacattcaggcttctggtcggccactatttaatcacagccgtatgttttaaccggccttatttgaagaagaagctttcgctcggctctgtggtgacggtttcaggtaaatgggacaagcaccgccaaaacatctctgttcaggagttgaaaaacgggccgcatcaagaagacaaaagcattgaaccagtgtattctgtgaaagaaaatgttaccgtcaaaatgatgaggcgctttattcagcaggcgctgacccaatatgcagactcacttcctgatcctcttccggaaaagctaagaaaaagctataaactgcctgactattatcaagcgttaaaagcaatgcaccagcctgaaacaagggaagcattaaagcttgccagacggcggtttgtttatgaagaatttttgttgtttcagttgaaaatgcaggcgttccgaaaggcggaaagagagcagacacaagggatacggcagcgtttttcaaacgaagaactcatgagatttatcaaaagcctcccgtttcccctcacaaacgcccagtcacgcgttcttcgcgaaataacagcagacatgtcttctccatacagaatgaaccgccttcttcaaggggacgttggatcaggaaaaacggcagtcgccgccattgcactgtatgccgcgatcctatccggataccaaggagcgctcatggtgccgacagaaattctggccgagcagcatgctgattcgctcgtttcgctatttgaaaaatgggacgtcagcgttgctcttttgacaagctctgttaaagggaagcggcgaaaagaactgcttgagcgtcttgcggcgggtgagattgatattcttgtaggaacccacgctttaatccaagacgaggtggagtttaaggcgctgagtctcgttattacagatgaacagcacagatttggagttgagcagcgcaaaaagcttcggaacaaagggcaggatcccgatgttctctttatgacagccactccaatcccaagaacattagcgatcacagtgttcggtgaaatggatgtatctgtcattgatgagatgccggctggacgaaagagaatcgagacctattgggtaaaacatgacatgctggatcgtatattggcatttgtcgaaaaagaattaaagcaaggcaggcaggcttatatcatctgtccgctgattgaagaatcagacaagcttgatgtgcaaaacgctattgacgtgtacaatatgctttctgatatttttcggggaaaatggaatgtcggccttatgcatggaaagctgcattccgatgaaaaagaccaggtcatgagagaattcagcgcaaatcactgtcaaattctcgtatcaaccactgttgtggaggttggcgtgaatgttccgaatgcaacgattatggtgatttatgacgccgaccgttttgggctatcacagcttcaccagctgcgcggccgtgttggacggggtgagcatcaatctttctgtattctgatggctgatccaaaatcagaaacagggaaagaacggatgaggatcatgtcggaaaccaatgacggtttcgagctgtctgaaaaggatctggaactgagaggtcccggtgatttcttcgggaaaaaacaaagcggaatgccggaatttaaagtggcggacatggttcatgattacagagcgcttgaaacggcaaggcaggatgctgcgaatcttgtggcttctgacgcgttctggaaggagccggaatacgctgtgttaagagatgaattgctgaagagcggagtaatggacggggaaaaattaagctgagtatcagaagtttttggtgttcagccagaaacaatcgttgcattccaatctatgaaattatatactactattagtacctagtcttaattgtccggatggtgtttagatatgagaagaaataagagagaacgccaggaattacttcagcagacgattcaagcaaccccctttattacagatgaagaactagcgggtaaattcggggtgagcatccagacgatacgtttggaccgcttagagctttccatacctgaactgagagaaagaattaagaacgtggcagagaaaacacttgaggacgaagtgaagtccctgtcacttgatgaagttatcggagaaattattgaccttgagctggatgatcaggcgatatccattttagaaataaaacaggagcacgtgttcagccggaatcagattgcgagaggacaccatttatttgcacaggcgaattctttggccgttgcagtcattgatgacgagctggcgctgactgcaagtgcagacatccgctttacaagacaggtaaagcagggtgaacgtgtcgtagcaaaagcgaaagtgacggctgtcgaaaaaggaagaacggttgtcgaagtgaacagctacgttggcgaagaaattgttttttctggacgctttgacatgtatcgttcaaaacattcataaaggtggagcatgcatgagaatagctgtagatgcaatgggaggagaccacgctcccaaagctgttattgacggagttataaaaggtatagaggcatttgatgatctccatatcacacttgtcggtgacaaaacaacgatagaatcacatttaacaactacatcagatcgcatcacggtgctgcacgcagatgaagtgattgagcctacggatgaaccggtccgtgccgtgcgaagaaaaaagaactcatctatggttcttatggcgcaggaggttgcggaaaacagagctgacgcctgcatttcagcaggaaataccggtgcattaatgacagccggtctctttattgtcggaagaattaaaggaattgaccgtccggcgcttgccccgacacttccgactgtttcgggagacggatttcttctccttgatgtcggcgccaatgtcgatgccaaaccggagcacctcgttcaatatgccatcatgggttctgtttattctcagcaagtgcgcggtgtcacttcaccgagagtcggacttttaaatgtcggaacagaagataaaaaaggaaacgaactgacgaagcagacgttccaaattttaaaagaaacagcaaacatcaattttatcggaaacgtggaagcgcgagaccttttagatgatgtggcggatgttgtagtaacagacggctttaccgggaatgttacactcaaaacgctggaaggctctgcgttgtcaatttttaaaatgatgagagacgtaatgacgtctactttgacatccaagcttgcagcagctgtgctgaaaccaaaattgaaagaaatgaaaatgaaaatggagtattcgaattatggcggagcaagtctttttggcttaaaagcgcctgtgatcaaggcgcacggctcttcagattcaaatgctgtattccatgcgattcggcaagcaagagagatggtcagccaaaatgtggctgcgctcattcaggaagaagtgaaagaagaaaaaacagatgagtagtctggaggtttttacatcatgagtaagattgcatttttattcccgggtcagggatcacaatttatcggcatgggaaaagagctttatgagcaggtgcctgctgcaaagcgtctgtttgatgaagccgatgaaacgttggaaacaaaactcagctcgcttatttttgagggggatgctgaagaattaacacttacatacaatgcgcagcctgctttgcttacgacaagcatcgctgttcttgagaaatttaaagaatctggcattacacctgatttcacagcaggacacagccttggtgaatattctgcactggttgcggctggcgctctgtctttcaaagatgctgtttatactgtcagaaagcgcggagagtttatgaatgaagcggtgccggctggcgaaggagcaatggctgcgattctcggcatggatgctgaagcattaaagcaagtaaccgataaagtcacagaggaaggcaaccttgtacagcttgcgaatctcaactgtcctggccaaatcgtcatttccggaacagctaaaggggttgagcttgcatctgaactggcaaaagagaacggcgcaaaacgcgcaattccgcttgaagtaagcggtccgttccattctgaactgatgaaaccggctgctgaaaagctgaaagaggtattggacgcctgtgacataaaagacgctgccgttccggtcatctcaaatgtttctgctgacgtgatgactgaaaaagcagatatcaaagaaaaacttattgagcagctttactctccggttcgttttgaggaaagcattaacaagctgatcgcagagggtgttacgacttttattgaaatcggtcccggaaaagtgctttcaggccttgtgaaaaaagtgaatagacggttaaaaacaattgctgtatcagatccggaaacgatcgagctggcaattcaaacgcttaaggaggagaatgataatgcttaatgataaaacggctattgtcactggcgcatcccgcggaatcggccgctcaatcgcccttgatctggcaaaaagcggagcaaatgttgtcgtgaactactccggcaatgaagcgaaagcaaatgaagtggttgatgaaatcaaatcaatgggcagaaaagcaattgctgtcaaagcggatgtatcaaatcccgaagatgtacaaaacatgataaaagaaacattgtctgttttttctacgattgacattctggttaataatgcgggaattacaagagacaatctcatcatgagaatgaaagaagatgaatgggatgatgtcattaacattaacctgaagggtgttttcaactgcacgaaagctgttacaagacaaatgatgaaacagcgttcaggccgcattattaacgtatcgtctatcgtcggcgtcagcggaaaccctggacaagccaactacgtggctgcaaaagctggcgtcatcggtttaaccaagtcttctgctaaagagctcgccagccgaaatattacggtaaacgcaatagcgccaggatttatctcaactgatatgacagataaacttgcaaaagacgttcaagacgaaatgctgaaacaaattccgctcgcgcgctttggtgaacctagcgatgtcagcagtgttgtcacgttcctagcttcagagggagcccgttatatgacaggccaaacgcttcatattgacggcggaatggtgatgtaagttttttctcgaaaatttcatcgtagtttctctagttttttaaaaacgaatccactataatacttgaggggaggtgaattgctatggcagacacattagagcgtgtaacgaaaatcatcgtagatcgccttggcgttgatgaagcagacgtcaaacttgaagcttctttcaaggaagacttaggtgctgattccctagatgtagttgagcttgttatggaacttgaagacgagtttgatatggagatttctgacgaagatgctgaaaagattgcaacagtcggcgacgctgtgaactacatacaaaaccagcaataagctgatgctaaaagtcccgccgaaacgcggggctttagccctttattcgtgcagttattacagcatgccgcttttacgcgcgctgtatccggtttagtcagagaagcgcggtgaacctgatgtgcctatggaggttactatgtcaaaacactcacattataaagataaaaaaaagttctataaaaaagtagaacaatttaaagagtttcaagaacggatttcggttcactttcaaaatgaaaagcttttgtatcaagcatttacacattcatcttatgtgaatgagcatcggaaaaagccgtatgaagataatgaaaggcttgaatttttaggtgacgctgttttggaactgacgatctccagattcttatttgccaaatacccggctatgagtgaaggagatttgacgaaattgagagccgcaattgtttgcgaaccgtctctcgtttcattggctcacgagctgtcattcggcgatcttgtcctgttgggtaaaggcgaggaaatgacaggcggaagaaagcgtcctgctctattggcggatgtttttgaggcatttatcggagccttgtaccttgaccaaggattagagccggtcgaaagtttcttaaaagtttatgtgttccctaaaattaacgatggtgctttttctcatgtgatggatttcaaaagccagctgcaggaatacgtgcagcgggacggcaaaggctctctggagtataaaatctccaacgaaaaaggacctgcgcacaaccgtgaatttgaagccatcgtatctctaaaaggtgaaccactcggagtcggaaacggccgttcaaagaaagaagccgaacagcacgctgctcaggaagctttagctaaattgcaaaaacaccatacgaaacaataaaatcccccttatgactcagggggatttcagtatgtatgccgtcttatttgaccaatgtttatgatagaattgaaatacttattacataaggaggatcgctatgttcctcaaacgtttagacgttataggatttaaatcatttgcagaacggatttccgtagacttcgttaaaggcgtgacagcagttgtcgggccgaacggaagcggaaaaagcaacatcacggatgccattcgctgggttctcggcgaacaatcggcacgctctcttcgcggcggaaaaatggaagacatcatttttgccgggagtgattcaagaaagcgattaaatctagctgaagttacgcttactcttgataatgatgatcatttcttgccaattgacttccacgaggtgagtgtcacaagacgtgtgtacagatcaggtgagagtgagtttctgattaacaatcagccatgccgcttgaaagatattattgatttatttatggactctgggcttggtaaagaagcattttctattatcagccaagggaaagtggaagagatcctgagcagtaaagcggaggatcgccgcagtatctttgaagaagcggccggggtgcttaaatataaaacgagaaagaaaaaagcagaaaataaactgtttgagacacaggacaatctaaatcgggtagaagatatattacatgagcttgaagggcaggttgaacctcttaaaattcaagcttcaatagcgaaagactaccttgagaaaaagaaagagctggagcatgttgaaattgcgctgactgcctatgatatcgaagagctgcatggtaaatggtcgactcttaaagagaaagtgcagatggcaaaagaagaagagcttgctgaatcgtctgctatttctgcgaaagaagcaaagattgaggatacaagggacaaaatacaagcgcttgatgagtcagtagatgagctccagcaagttttactggtaactagtgaagagctggaaaagcttgaaggccgtaaagaagtcctgaaagaacgaaagaaaaacgctgtgcaaaaccaagaacagcttgaagaagccatcgttcagttccagcaaaaagaaacggttctgaaagaagagctttcgaagcaggaagctgtcttcgaaacgcttcaggctgaggtgaagcagttaagggcgcaagtaaaagaaaaacagcaggctctcagtcttcacaatgaaaatgtcgaagagaaaatcgagcagctgaaaagtgattattttgagctgttaaacagccaggcttcgatacgcaacgaactccagcttcttgatgaccagatgtcccaatccgctgtcacattgcagagactcgcggacaacaatgaaaagcacctgcaggaacggcgtgatatttctgcgcgtaaagccgcatgtgaaacggaatttgcccgaattgagcaggagattcacagtcaagtcggtgcatatcgtgatatgcagacaaaatatgagcagaaaaagcgccaatacgaaaaaaatgaatccgctctgtatcaggcataccaatacgttcagcaagcgagatcaaaaaaggacatgcttgagacgatgcagggagatttctccggcttttatcaaggtgttaaagaagtgctgaaagcgaaagagcgccttggcggaattcgcggagcggttcttgagctgatttctacagaacagaagtatgaaacggccattgaaatagcgctcggcgcttctgctcaacacgtcgtgaccgacgatgaacaatctgcccgaaaagcgattcaatatttaaagcagaattccttcggccgggcgacgtttctgcctctttctgttattagagaccgccagcttcaaagccgtgacgcggaaacagccgcccggcattcatcatttctcggggttgcaagtgaacttgtcacatttgatcctgcgtatcgaagcgtcatccagaatcttcttggaaccgttctgatcacagaggacttaaagggtgcaaacgagcttgcgaagcttctcgggcaccggtaccgcatcgtaacccttgagggagatgttgtgaaccccggtggttcaatgacgggcggcgcggttaaaaagaaaaataactccctcctcggaagaagccgggagctagaagatgtgacgaaacggctcgctgaaatggaagagaaaacagctctgcttgaacaagaggtcaaaacccttaaacaatccattcaggatatggagaaaaaactggctgacttaagagaaaccggggaaggcttaaggttaaagcagcaggatgtgaaaggccagctgtacgaacttcaagttgccgagaaaaatatcaatacccatttagagctctatgaccaagaaaaatctgctctgtcagaaagcgatgaagagaaaaaagcgcgcaaacgcaagcttgaagaagagctctctgccgtatctgaaaagatgaaacagcttgaagaggacatagacaaactgacaaaacaaaaacaaacgcaatcctcaacgaaagagtctctttccaacgagcttactgagctgaagatcgctgcggccaaaaaagagcaggcatgcaagggggaagaggacaaccttgccagattaaagaaagagctcactgaaacagagattgcgttaaaagaagcaaaagaagacttaagcttcttaacgtcagagatgtcatctagcaccagcggcgaagaaaagctggaagaagcagcaaaacataaattgagtgacaaaacgaaaacgatcgaactgattgcattaaggcgcgatcagcgcatcaagcttcagcatgggcttgatacgtatgagcgtgagctgaaagaaatgaaacgcctgtataaacaaaaaacaacgctcttaaaagacgaagaagtcaaactcggacgaatggaagtcgagcttgataatttactccaatatttacgggaggaatacagcttgtcctttgagggggcaaaagagaaatatcagcttgaaactgatccagaggaagccagaaagcgcgtgaagctgattaaactcgcaattgaagagctgggtaccgtgaacctcggaagcatagatgagtttgagagggtcaacgaacggtacaagtttctgtcggaacaaaaagaagatttaacagaagcgaaaaataccttgttccaagtgattgaagaaatggatgaagaaatgacgaagcgctttaacgacacattcgttcaaatccgctcacactttgatcaagtttttcgctccttattcggaggagggcgagctgaactgaggctcaccgatcctaacgatctgcttcattcaggagtcgagattatcgctcagccgccggggaaaaagctgcaaaacttaaacctcctgtcaggcggagagcgtgcgcttactgctatagcgctcttattctcaatcctaaaggttcgtccagtgccgttttgcgtccttgacgaagtagaggctgcgctcgacgaagcgaatgtgttccggtttgcgcagtatttaaaaaaatacagcagtgatacccagtttattgtgattacccacagaaaaggaacgatggaggaagcggatgtgctttatggcgtaaccatgcaggaatccggtgtttccaaggtaatctccgttaagctggaagaaacaaaagaattcgttcagtaacgaggaaagaggttaaaagatgagcttttttaaaaaattaaaagagaaaatcacaaaacagacagattccgtatctgaaaagtttaaggatggccttgaaaaaacaagaaactcctttcaaaacaaagtgaatgatcttgtatcccgttaccgtaaagtggatgaggatttcttcgaagagcttgaagaggttcttatcagcgcggatgtcggttttacaaccgttatggaattaatagatgagctgaaaaaagaagtcaaacgcagaaatattcaagatccaaaggaagtccagtcagtgatttctgagaaactggtcgagatttataacagcggagatgagcaaatttcagaactgaacatccaggatgggcgtttaaacgtaatccttctggtaggtgtaaacggtgtcgggaaaacaacaacgatcggaaagcttgctcataaaatgaaacaagaaggaaaatctgtcgtacttgccgccggagacactttcagagcgggagccattgaacagctggaagtatggggagagcgtacaggagtgcctgtcattaagcagacggccggaagcgatccggcagctgtcatctacgatgctgttcatgctgcgaaagcaagaaatgccgatgtattaatttgtgatacggcagggcgtctccaaaacaaagtaaatctcatgaaagagcttgaaaaagtaaaacgtgttatcgaaagagaagttcctgaagctccgcatgaggtgctgcttgcccttgatgccacgaccggccaaaatgcaatggctcaggcaaaagaattctctaaagcaacaaatgttaccggcattgctttaacgaagcttgacggtacggcaaaaggcggtatcgtccttgcgattcgcaacgagcttcacatcccggttaaactagtcggtttaggagaaaaagttgatgaccttcaggaatttgatccagaatcctatgtgtacggactcttttcagatttagtggaaaaagccgacgattaagaaaaaggccccaacatcttggggcctttttcttttttatcttcttacttgataggcgaaatgataaaggctgttatcagtggataccagtcttgactcaccagaaaaaactctgaatgggatgatgtcatagtaatgaacggaaacagatgtgtaatacgtatagtaaccagcagctggccccaaatacattggaacctcaaatgttccgtttgcatcagttgttcctgaagcagtttgtgttgtgtttccgaccttcgtgtccgcttcaaatcttacgggcgcgtttggcactggctgtccgttttggtcgagtaatttgccgcttactgtaatattgtacttgactcgccaatattgaccttgcccgtaattgattttaccgtatacccctccatctgtgctgatatttgtgattgaggccttataaggtgcctcagcagcgtctgcttgctgtgccgggaaacctattgtaaacagggctgccagacacaacataaacaataaaccgatttttttcataaaaatcctccttaaaatagggttcatatacaatatcggaataaattggatgatatttagcgtattttggaaaaggttaatcgtcgctttgacaagataaaaacttgacagtgtcaataaaaccgtgtaaactaagttatcgtaaagggatttgacttaacaaaggggagagctcaaatgtcactcgaaaagacaacgagaatgaattatctgtttgatttttatcagtcgttgttgacgtcaaaacagaagagctatatgtcgctttattatttggacgatttctccctaggcgaaatagccgaagaatatgaggtttcaagacaagctgtttatgataacatcaaacgaacagaagcgatgcttgaacaatatgaagaaaagctgctccttttgaaaaagtttcaggagcgtaaagagatgtttaataagctgaaggagcttgcttccggttcaaaagaagaggaagaaattacagctctgattgaagcgcttgagaaattagattaggaggcggcaaactatggcatttgaaggattagccgaccgactgcagcagacgatttctaaaatccgcggaaaagggaaagtcagcgaacaagatgtaaaagatatgatgcgtgaggttcgtcttgcgctgcttgaggctgacgttaactttaaagtagtcaaagattttgtcaaaaaagtaagtgaacgcgctgtaggccaagacgtcatgaaaagtctgacgcccggccagcaggtcattaaagttgttcaagaggaactgactgagctgatgggcggcgaagagagcaaaatcgccgtcgcaaaaaggccgccgactgttattatgatggtcggtctccaaggtgccggtaaaacgacaacaagcggtaagcttgcgaatctgctgcgcaaaaagcataatcgcaaaccgatgctggttgctgccgatatttaccgcccagccgcaattaagcagctggaaacactcggcaaacagcttgatatgcctgttttttctcttggcgatcaggtcagtcctgtagaaatagctaaacaggctattgagaaagccaaggaagaacattatgactatgtcattttggatacggcaggccgcttgcatatcgaccatgaactgatggatgaactgaccaacgtcaaagaaatcgcgaatccggaagaaattttcctggttgtcgattcaatgaccggtcaggacgctgtgaatgttgccaaaagctttaatgaacagctcggtttaaccggtgttgtgttaactaagctggatggagacacacgcggcggggctgcgctttctattcgcgctgtcacaaacacgccaattaagttcgcaggtttgggcgaaaagcttgatgcgttagagccgttccaccctgaacgcatggcatcaaggattctcggcatgggcgacgtgctgacattgattgaaaaagcacaggccagcgttgatgaagacaaagccaaagagctggaacaaaaaatgagaacgatgagcttcacattggacgattttctggagcagctcgggcaagtcagaaacatggggccgcttgatgagcttctgcaaatgatgccgggtgcaggtaaaatgaaaggcctgaaaaacatccaagttgatgaaaaacagctgaatcatgtggaagcaatcattaaatcaatgactgttcttgaaaaagaacagccggatatcatcaatgccagccggcggaagcggattgcgaaaggaagcgggacatccgtacaggaagtcaaccgtctgcttaagcagtttgatgaaatgaaaaaaatgatgaagcagatgacaaacatgtcaaaaggcaagaaaaaagggtttaagctaccttttatgtaatcggttatacatgataaaaccgttgttaagaaaaaacactttacaaacacttttatcattgttaatatactatcttgttgaaatattttcggaggtgctagtaaaatggcagtaaaaattcgtttaaaacgtatgggagcaaaaaaatctcctttctatcgtattgttgtagcagattctcgttcaccacgtgacggccgtttcatcgaaacagtcggaacttacaacccggttgcaaaaccagcggaagtaaaaattgacgaagagcttgctcttaaatggcttcaaactggagcgaaaccatctgatacagttcgcaacttgttctctagccaaggaatcatggaaaaattccacaacgctaaacaaggcaagtaatgactgatcaacacttggaagatttgattgtccacattgtgacgccgcttgttgatcatccagatgacattcgcgtcataagagaagaaaccgatcaaaagattgcgctgcgcttatctgtccataagtcagataccggtaaagttatcggaaagcaaggccggactgcaaaagcgattcgaacagctgtatttgcagctggcgcacagtcttctaagaaagttcaatttgaaatatttgactaaaagggagagggccggcacctcccctttttttacacgcaaaaaaagggtaaactgatagaagcttaggcaaaatagaaaagcctgggcgagtaaaagttttaaaagcggggagcttggtgcgatgcaaattattcaccgtgtagccgttatgcaagtcttaaccgagcgcagtaaagaaaagcttttagcttcttttgccgaaaagaaacaaatgcttgaacgagaatgcagccagctctattttcagcttagaaaacatgagaaagaacagcaaaaccctgatatgatagaacaatttaaaaaggcaatagaaaagcgaaaagatgatatgaaaatcatcgattttcaaattgctcaagtacatacattgcagcttggcagtgagttgaaagaaaaggaagtcgatgcgctgctgacgattgaagccggggatgactggcatgagaaaacagcagcgaacaccatcgtcataaaagacggaaaagtaattgaaattcgccagaggtgatcatatgacaaagcgatggtttaatgtaggcaaaatcgtaaatacccacggaatcaaaggcgaagtgcgggtgatttcaaaaacagattttgccgaagaacgatacaagccgggaaacacgctgtatttgtttatggacggccgtaacgaaccagtggaggtaacggtaaacacacatagactgcataagcaatttcatctcctgcagtttaaagaaagacaaaacctaaatgaagtagaagagctgaaaaacgcaatcattaaagttcctgaagaagaattaggagagctgaatgagggtgaattttatttccacgaaattattgggtgtgaagtatttactgaagaaggcgaactcatcggaaaggtcaaagaaattttgacgcctggagccaatgacgtttgggtcatcggacgaaaaggaaaaaaagacgcactcattccttacattgaatcagtggtcaaacatatcgatgtcagggaaaagaaaattgagattgaactcatggaagggttaatagacgaatgaaaatcgactttttgacgctgtttcccgaaatgtttgaaggcgtgctcggctcatcgattcttcaaaaagcccaggaaaaagatgcggtgcagtttcaagtcgtaaatttccgggagtactctgataacaagcacaatactgttgatgattatccttatggcggcggggcaggcatggttctcaagccccagcctgtttttgacgcggtcgaggacctgacatcaaaggcagccgctgctccgcgtattatcctcgtatgcccgcaaggtgagcgttttacccaaaaaaaagccgagcaattagcaaaggaagagcatttgctgttcatttgcggccattatgaaggctatgatgaacgcattcgcgagcacttggtaacggatgaaatatcaattggcgactttgttctgacgggcggtgagctccctgcaatgatgatcgcagacagtgtggtcagactgcttccgggtgtactgggtaaagaggcttcccatattgaggattccttcagcaccggacttttagagcacccgcattatacaagaccggcagattacaaaggtttaaaagtgcctgaaacactcttgtcaggaaaccatgcaaaaattgaagaatggcggaataaagaatcgatcagaaggacctacctaagacgtccggatctgttgaaagactacccgcttacagagcagcaaagaaagtggatttctgaatgggaaaaagaatagattttattgcataggctatgaaattgtgataagatactacttgtggcttaagcgggcttatccgctgcaagcttgaaaacgatgttccgctgtgccggtttttgtggccaagagcatctgttggaaggagttgaaaacgatgcaaaaactaattgaagatatcacaaaagaacagcttcgtactgatcttcctgcgttccgtcctggtgacactttacgtgtacacgttaaagttgttgagggtaaccgtgagcgtatccagatctttgaaggtgttgtgattaagcgtcgtggtggtggaatcagcgaaacgttcacagttcgtaagatttcttacggtgttggcgttgaacgtactttcccagtacacacaccaaaaatcgcgaaaatcgaagttgtacgttacggtaaagtacgccgtgctaaactttactacctgcgtgaacttcgcggaaaagcggctcgtattaaagagatcagacgataatgataacgaacgaaaagagcttgttacctgtaacaagctctttttttatacagaatttgaaaatgccggacaggcatcgtaaaatacataaaggacaacaatgaatcatgcatactgaagataaaggcggtgttcgtgtcacatgacaattcaatggttcccgggccatatggcaaaagcaagaagggaagtaaccgaaaaattaaaattaatcgatatcgtatatgaattggtagatgccagaattccaatgtcatcaagaaacccaatgattgaagatattctaaaaaacaagccgcgaattatgctgttaaacaaggctgacaaagcagatgcggcagttacacagcagtggaaagagcactttgagaagcaggggatccgctctctgtctattaattctgtaaatggacaagggttaaatcaaattgtgcctgcatcaaaagagatcctccaagaaaaatttgaccggatgcgtgcgaaaggtgtgaagccgagagcgattcgcgctttgattatcggcattccaaacgtcggaaaatcaacactcatcaaccggcttgcaaagaaaaacatagcaaaaacgggagacagacctggtattacaacctctcaacagtgggtcaaagttgggaaagaattagagctattagatacaccgggaattttgtggcctaaatttgaggatgagcttgtcggtttgagactggcagtcaccggggctattaaagactcgattatcaatttgcaggacgtggccgtgtttggtcttcgttttctcgaagaacattacccagaacggctcaaggagcgttatggccttgaggagatcccagaggacattgccgagctgtttgatgcaataggtgaaaagcggggctgtctcatgagcggcgggctcattaactacgataagacgactgaagtcatcattcgcgatattcgcactgaaaagttcggcaggctgtcatttgaacagccgacgatgtaaaggcgcgcagaaatgcgggtctttattttttcttggctgaaccgatacatacagtaagggagaagagaaagtgaatacattaaccgtaaaggacattaaagaccgtttgcaggaagtgaaggatgcacaagacccatttatttcccaatgcgaaaacgacccgagaaaaagcgttcaaacgcttgtagagcaatggcttaaaaagcaagcgaaagaaaaagcgctgaaagaacaatgggtgaatatgacttcctatgaaaggctggcaagaaacaaaggatttcgcttgattgcaggtgttgacgaggtcggccgggggccattggcaggaccagttgtcgccagcgcagtcatccttccagaggaatgtgaaatacttgggctgacagactccaaaaagctttcagagaaaaaacgcgaggaatattacgagcttattatgaaggaagcactggcggtcgggataggaattgtagaagctactgtgattgatgagatcaatatatatgaagcttcaaaaatggcaatggtgagagcgatacaggatttgtcggatacacctgattatttgcttgttgacgcaatgacacttccgctcgacacggctcaggcgtcaattataaaaggcgatgccaaaagcgtgtctattgcggcaggtgcgtgtatcgcaaaagtgacgagggaccgaatgatgagcgcttatgccgaaacgtatcccatgtacggctttgaaaaaaataaaggctatgggacaaaagaacatttggaagctctcgctgcatacggcccaactgaattgcaccgcaaaactttcgctcctgttcaatctttcagataaatcaccatggacaaggaggcacctttttaaaatgaacatacgaaatgatgtgcaaaaggcgctgcagcaccttttcgggcgtacagccgtcccgcaggaaacatcaaaagtaaacgaagcgctaaacggggagaagcgtctcctcttaggaaaagtgcttcgtttactaggagatcagcatgccctgatccaagtcggcaatcaaactgttcagggaaaacttgaaactcagcttcgtcctcaggcatactattggttttcctacgaaaaaaaaacggcagagcaaacaggccgtcttcaggtcgttcaaagctttgatcaaaatcctaaaaccattcaggatgcagctggcaaacttttaaatgctatttcagtgaagacgtcaaacgcagctctcatgatgacaggagcgatgctgaaaagcaaaacacccgtaacagaaaatgatatcaaaacagctgtccgctggatggacacgctgccttcgcaagacacaaaaaaagcagttgaaacggttctcttcgctttaaagcgtgatcttcccattcactccgagattttgaatggtgttcacgctgtgaaatcgcctgttccgttgcatcagcacgtatcccagctgctacaggcaatcgaccaaaaccctcagcagagccaaatgatgtcaaagctaaaggaagcagttacggtgcttttaaatagtgaaatcgatgtccatgcagaacggctgattgataagcttatttctttaaccgacaatacgaaagcaccttctccgacgaatacagctggaagcagggagcttagcacaccagctggctcccccggaaaagccagcctgccgattgcaaatcacacagcagaacagggaagcatacaagaagagcctgttaaaacagcagcagacattccaattaaagaagcccgccagctgctcgtgaagctgacggaatctgctgaaaaaaacagtctccaaattgtgaaagaagcagcaaattggattaaagcggctgcttcatcgggtgatagtaagtcacttgcagcttcagctgttttacaagcggcacaagtcacagaccaggaagccgaagtctttttaaaggctgttcagcagacagcaccccatttggcggataaggcagatgttctttctttcttatccaaagtgaaaacggcaatcggcgcaagggacgaggttgcgttcattaaagcgtttgaacaaggaagcgcagtcacatctggcgaaatgcaatccatcaagctggctctttctgccttaagagcatcgcatgaggtagccgaaccagtcaaacaagaagccgatcagctttttcataaattaaatggccagcttttcatgcagcaggaccatccatcatacagccaaattgtaatgtcatttccgatgttttcgaagtcaggggttcaggacatgactgttctgtttaaaggaaagaaagaagcggatggaaagcttgatccttcccattgccgccttttgtttttgctgcagcttgatacactaaaagaaaccgtcgttgattgcttggtacagcaaaaagtcatgaccattacaatagagactgatttcgagctgcaggctgcgatcgatccgatggtgcccgcgcttaaacaggggctaaaggaaatggggtacagcctttcaggggtaaacgctaaaaaaagggttcacaccgaagaaaaggcttcaatcgatcaatatataacaagtatcagtgatcaggaagtggatgtgaaaatatgaaagagcagacaccgatcagaaaagctgttgctctccattatgacgaacaaaaagacaaggcgccgagagtgattgccacagggaagggccatgtagctgacaacattatcaaagaagcgaaaaaagcaggggtcccgattcaagaagatcggacccttgtcgaattaatgcgccatttgacggtagatgatcaaattcctgaagctctttatgaaacggtagccgagattttttcattcatttacaaattggacgaaagcgtaaaaaacgaaaaatagctaaaatattccccatcctcctttgaaatttatgtttttaataaagtaaaagtttgaatgtttagaaggattaaaagattttgcatcgaactgtagacaattcttccagtattattatagaatgaaagcgcagtctattttagttttgttacataagttaggaggatgggaaatgaatatccatgagtaccagggaaaagaagtcctcagaaaatatggggtatctgttcctgaaggtaaagtggcttttacagcagaagaagcagttgagagtgcaaagagcttatccagctcggtttatgtcgtaaaggctcaaattcatgctggcggtcgaggcaaagctggtggggtaaaaatagcaaaatcattagacgaagtaaaagcgtatgccgaagaactattagggaagaccctagttacacatcagacgggtccggacggccaagtaataaaacgcttacttattgaagaaggctgcgatattaaaaaagaatattacatcggtctagtgcttgaccgcgccacttcaagaatcgttttgatggcttctgaagaaggcggaacggaaattgaagaggttgcggagaaaacaccggaaaaaatcaaaaaagctgtcattgatccggctgttggccttcaaggctatcaagccagagaaattgcattcgctattaatattccaaaagagctcgtgggaaaagctgctaaatttatgcttggactatataaagcgtttgttgagaaagactgctcaatcgccgaaatcaatccgcttgttgttaccggcgacggaaatgtgatggcgcttgatgcaaaattgaattttgacagcaatgcgttgtaccgacaaaaggacattatggaatacagagatttggatgaagaagatccgaaagaaattgaagcgtccaaatatgatctaagctacatttcccttgatggaaatatcggctgtatggtaaacggcgcggggcttgcaatgtccacgatggatattatcaagcattatggaggagaaccggccaacttccttgatgtgggcggcggtgcaaccgctgaaaaagtcacggaagcatttaaaatcattctttctgatcaaaacgttaaagggatttttgtcaacattttcggcggcattatgaaatgtgatgtcatcgcagaaggggttgttgaagcgactagacaagttggtttgacattgccgcttgtcgtccgtcttgaaggcacaaacgtggatctagggaagaaaatccttagtgaatcaggattaaacattacatctgcggaatcaatggctgacggcgcgcagaaaatcgtatccttagtttaagaaagaatgaaaggcaggggaccaaataatgagtgttttcattaataaagatacaagagttattgtgcaagggattacaggttctaccgctttatttcatacgaagcagatgcttgaatacggcacaaatatcgttggcggtgtaacacctggaaaaggcggaacagaagcggaaggtgttcctgtatttaatacagtggctgaagcagttcaaacaaccggcgctaacgcgtctgttatatatgtgcccgcaccgtttgcagctgatgcgattatggaagcggtagatgcggagcttgatctcgtgatttgtatcacagaacatatcccggttttggatatggtgaaggtcaaacgcttcatggaaggcaagaaaacgagactgatagggccgaactgtcctggtgtcattacgcctgaagaatgtaaaatcggcattatgcccggatacatccataaaaagggtcatgtaggcgttgtatcacgttcaggaacattaacatacgaagcggtgcaccagctctcagaagcgggtgtagggcaatctacagctgtgggaatcggcggcgaccctgtaaatggaacaaactttattgacgttttaaaagcgtttaacgaagatcctgacactcacgcagtcatcatgattggcgaaatcggcggtactgccgaagaggaagcggcagagtgggtaaaagccaacatgacaaaaccggtagtcggttttatcggcggtaaaacagcacctcctgggaagcgcatggggcatgcaggcgccattatttccggcggaaaagggacagctgatgaaaaaatcaaaacccttaatgcatgcggaatcgaagttgcagagacaccttctgtcatgggtgaaaccttaatcaaggtgctgaaagagaagaacttgttcgaaacttgcaaaacgcattaataaaaaagggacagccgtcaaggctgttcctgctttttctaacaaaaggaggtcaatctattggatcaggccgctgcctgcctaacgatttgcagaatcaatcaattattatccccatcccttctattaaaatggtggaaagccgatccgtctatgtcgctgacatcacccgtgttacaaacggttactcgtgatcaaataaaagcagctgcattaaaaaacgaaatagaacaattttatccaaagctcccgcgtgtacttgctgcttatcgtgagcaaggcattaacaccatccctatttcttcaaagcaatatcctttctggcttaaaagcatttatgatccccctgccgtactgtttgcaaaaggtgatatgactcttctttcgaaagggagaaaaattggaattgtagggacaagaaatccaacagcttatgggaaacaagttgtcaatcatcttacaaaagagatctgtcgtaaaggttgggtgattgtcagcggactggcgtctgggatagacggaatgtcccatgctgcaagtattaaggcgaaggggcggacaattggcgtcattgcaggcggatttcaacacatttatccccgagaaaaccttcagttagcagatcacatggctaaacaccatatcctgctgtcagagcacccacctgaaactaaaccccaaaaatggcatttccctatgagaaaccgtattatcagcggactaagtgaaggcgttattgtcgttcagggcaaagaaaaaagcggttcgctgattactgcctatcaagcattggaacaagggagagaggtatttgccgtacccggttcattgtttgacccttacgccggaggtcctataaaactgatccagcagggggctaaagccatatggtcagcagaggatattttcgaggaacttcctgagagaaacgttcaatatacggaacccttttgaattatcgtttgacaaacggtattgtaatatttaataatagtgaggatttaaagttgcatattgttttctatttaattaatgacgttcatgataaagaatgaaatgttgaaagccaaataaagacagctgcaaaaataaaattgaaatatcttgaaaagagagagaacacctcttgagggggatgaaaatgtctgattatctagtcatcgtggaatcgcccgctaaggcgaaaacgattgaacgttacttaggtaaaaaatataaagtaaaagcatcaatgggacatgtccgggatcttccaaaaagtcaaatgggagttgacatagaacagaattttgaaccgaaatatattaccattcgaggtaaaggcccggtattaaaagagctgaaaacggctgcgaaaaaagccaaaaaagtgtatctcgcagccgaccccgacagagaaggggaagcgattgcatggcatttggcacacagtcttgatttagatctcaactcagactgccgtgtggtgtttaacgaaattacaaaagacgctattaaggaatcgtttaagcatccccgcatgatcaatatggatttagtggatgcacagcaagcgagacgtattttagacaggcttgtcggatataaaatcagtccaatcttatggaaaaaagtcaaaaaagggcttagcgcaggacgcgtgcaatccgttgccctccgtttgattattgaccgtgaaaaagagattaacgactttaagcctgaggaatattggacaattgacggtacgttcttaaaaggtcaagaaacctttgaagcgagctttttcgggaaaaacggcaaaaaacttcctttaaatagtgaagctgatgtaaaagagattctttctcagctcaaagggaatcaatatacagttgaaaaagtaaccaaaaaggaacgcaaacgtaatcctgctttgccttttaccacttctaccctgcagcaggaagcggctcgcaagctcaatttcagagcgaagaaaacgatgatgattgcacagcaattatatgaaggaattgatttaggaagagaaggaacggttggtctgatcacgtatatgagaacggattcaacccgtatttcaaatacggctgttgatgaagcagctgcatttattgatcagacatatggaaaagagttcctaggcggaaaacggaagcctgcgaaaaagaatgaaaatgcccaggatgcccacgaagcaattcggccgacatcagttcttagaaaaccaagtgaattaaaagcagtcctcggcagagaccaaatgagactgtataaattaatttgggagcgttttgttgccagccaaatggcaccggctgttctcgatacaatgagtgtcgacctgacaaacaacggtttgacatttcgtgcaaatggaagtaaagtcaagttttccgggtttatgaaggtgtatgttgaaggaaaagacgatcaaatggaagaaaaagaccggatgctgcctgacttacaagaaggcgacacggtattatcaaaagatatagaacctgagcagcattttacccagccgcctccgcgatatactgaggcccggcttgttaaaacccttgaagaacgcggtatcggccgtccatccacatatgctccgacacttgatactattcagcggcgcggctacgtggcattggataataaacgtttcgttccgactgaattaggtcagatcgttcttgacttgatcatggagtttttccctgagatcattaacgttgagtttacagctaaaatggagagagatcttgatcatgttgaagaaggaaataccgaatgggtcaagattatcgataatttctacaccgattttgaaaaacgcgtcaaaaaagccgaatcggaaatgaaggaagttgagattgaaccagagtatgctggagaggattgtgaattgtgcagttctccaatggtatataaaatgggacggtacggtaaattcttagcttgctccaacttccctgactgccggaacacgaaaccgattgtgaaacaaatcggtgtgaagtgcccgagctgcggagaaggaaacattgttgagcgaaaatcgaaaaagaaacgggtgttttacggctgtgaccgttatccggactgtgaattcgtatcatgggacaaaccaattgaacgaaaatgcccgaaatgcggaaaaatgctcgtcgagaaaaaactcaaaaaaggtatacaagtccaatgcgtggaatgcgattataaggaagaaccacagaagtagcggtgagcagggtcttgctcaccttctttgtgtgttaaaagaaggccttgaataataaaataggagatgtgaaagatgaaccaacaaacagtgaatgtaatcggagccggactcgcaggaagtgaagcagcatggcagcttgccaaacgtgggattcaagtcaaattgtatgaaatgcggccagttaaacaaacgcctgcgcaccatacagataaatttgctgagcttgtctgcagcaactctcttcgctctaatacacttgctaacgctgtcggtgtattaaaggaagaaatgcgtgcgcttgattcagccattatcgctgcggctgacgaatgttcggtgcctgccgggggcgctcttgcagtagaccgtcatgaatttgccgcaagtgtgacaaatcgggtgaaaaatcatccaaacgtaaccgttattaatgaagaagtgactgaaattcctgaaggccctactatcatcgcaacgggtccgttaacatctgaatcgctgtctgcccagctgaaggagctgactggagaggactatttatatttttatgacgcagcggcgccaattgtagaaaaagacagccttgatatggataaagtgtacctaaaatcccgttatgataaaggtgaagcagcatatttgaactgcccgatgacagaagaagagtttgaccgttttcatgaagcattaacatcagcagaaacagtgccgttaaaagaatttgaaaaagagattttctttgaaggctgcatgccgattgaagttatggcaaaacggggtaagaaaacaatgcttttcggtccgatgaaaccggttggtctagagcatcctgttacaggaaaacgcccttatgccgtcgttcagctcagacaggatgatgctgcgggaacactttataatattgtaggattccagactcatttaaaatggggagaccaaaaggaagttctcaagttgattccaggacttgaaaatgtagaaatcgtcagatatggcgtgatgcacagaaacacatttattaactctccaagcctgttaaagccgacttatcaatttaaaaaccgcagtgatctgttctttgcaggccaaatgacgggagtagaaggatatgtggaatcagctgcctcaggacttgtagcaggcattaatgcggcgaagcttgtattgggagaagagcttgtgatcttccctcaggaaacagcaattggcagtatggcacattatattacaacaacaaaccagaagaacttccagccgatgaatgcaaactttgggcttttgaaagaattgccagttaaaattaaaaataaaaaagaacgaaatgaacaatacgcgaaccgtgcgattgaaacaattcaaacaatttcgaaaacaatataggtattgattgcaacctgagcgcgatttgtgataccatttaaaagcccttcctggggaggtattaggcatggagaatgttaagaatttcgtaaagttattcgttgaatatttacaaattgaaaaaaattattcacaatatactattgtgaattatgtggattcaattgaagaattcgagactttcctgcgcgttcaaggtataaatggatttgaagaagctgcatatcaagatactaggatttttttgacagaagcctatgaaaaaggtttatcgagaagaacaataagcaaaaagatatctgcattaagaagcttttataagtttctgatgcgggaaaagcttattgaagaaaatccgtttcagcttgttcatctgccaaaacaggagaaacggataccgaagtttctatatcaaaaagagcttgaggagctgtttgaagtttcagatataagccagccggccggaatgagggatcaagcgctgttagagctgctctatgccaccggaatgagggtcagtgaatgctgttccataactattaacgacgttgatttatttatggacactgtgcttgttcacggtaaaggcaagaagcagcgctatatcccctttgggtcttatgcccgcgaagcgttgaaggtatacatgaatagcggaagacagtgcttgctgatgaaggcaaaagaacctcatgatctattattcgtaaatcaaagaggcggaccgcttacagcccgtggcatcagacatattttaagcgggcttgttcaaaaagcgtcaagcactttacatatccatccgcatatgcttcgacatacgttcgccacgcatctgttaaatgaaggagcggatttgagaagcgttcaagaactgctcgggcattccaatctgtcttctacacagatatacacgcacgtttcgaaggaaatgttgagaaacacatatatgtctcaccatccaagagcatttaagaaaaattaaaggaggccctttatgtcatcttttcatgcgaccacaatatttgccgtacagcataaaggacgaagcgctatgtccggagacggccaagtaacatttggtcaggctgttgtcatgaaacacacggcacggaaagtgagaaaactgtttaacggcaaagttcttgctggctttgcgggatctgttgcagacgctttcactttattcgaaaagtttgaagctaagcttgaagaatataacggcaacttaaaacgggcggctgttgagcttgcgaaggaatggcgcagtgataaagtgctaagaaagctcgaagccatgctgattgttatgaatcaggatactttgcttctcatatcgggaacaggcgaggtgatcgaaccagatgacggcattctcgcgattggatcaggaggcaattacgctttggcagcgggaagagcactgaaaaagcatgccggtgaaagcatgtctgcaagtgagattgccagagccgcgttagaaacagcaggcgaaatttgtgtttacacgaacgatcaaatcatactggaagagcttgaatagaaaggacttgaggcgcatggaaaaaaaaccgttaactcctagacagattgtagatcggttagaccaatatattgtcggtcagcaaaatgcgaaaaaagctgtcgccgtggcattaagaaaccgctatagaagaagtcttctggatgaaaagctgaaggacgaggtcgttccgaaaaacattttaatgatgggtcctaccggcgtcgggaaaactgaaattgccagacgaatcgctaagctttcaggtgcgccatttatcaaaattgaagcgactaaatttaccgaagtcggctatgtaggcagagatgttgaatcaatggtcagagatcttgtggagacttctgttcggcttataaaagaagagaaaatgaatgaagtaaaggaacaggcagaagaaaatgcaaacaaacgcattgttcgtctgttagttcctgggaagaaaaaacaatctggcgttaaaaatccgtttgaaatgttttttggaggcagccagccgaatggtgaagatgaggcggagagccaggaagaagcaaacatcgaagaaaaaagaaaacgaatggcacatcagctggctttaggagagctcgaagactactatgtaacagtagaagtcgaagagcagcagccttctatgtttgacatgctgcagggctcgggtatggagcagatgggtatgaacatgcaggatgcgctgagcggattaatgccaaagaaaaagaaacggcgcaaaatgacagtcagagaagccagaaaagttctgacgaatgaagaagcaagcaaactcatcgatatggatgaagtcggccaggaagcagttcagagagcagaagagagcgggattatctttatcgatgagattgataaaatcgcaaagaacggcggtgcatcttcttctgccgatgtttcaagagaaggcgttcagcgggatatccttccgattgttgaaggttctaccgttgtcacaaaatatggttctgtaaaaacagaccatgtattatttattgcagcaggagcgtttcatatggccaaaccgtctgatttgattcctgagctgcaggggcgtttcccaattcgtgtagaactgaacaaactcacggtagacgacttcgtgagaattttggttgagccggataatgcgctgctgaaacaatatcaggcattattgcagacagaaggtatatctcttgaattttctgacgaagctattcataagattgctgaagttgcttatcatgtgaaccaggacacagataatatcggtgcgagacgccttcatacaatacttgaacgcctattagaagatttgtcgtttgaagctccagatgtaacgatggagaaaataacgattacaccacagtatgtcgaagaaaagctcggaacgatagccaaaaacaaagatttaagtcaatttatattgtgaaaaatttaatatgaggaatgtttaggaggattatttatcatggctttattacaaaaaacaagaattattaactccatgctgcaagctgcggcagggaaaccggtaaacttcaaggaaatggcggagacgctgcgggatgtaattgattccaatattttcgttgtaagccgcagagggaaactccttgggtattctattaaccagcaaattgaaaatgatcgtatgaaaaaaatgcttgaggatcgtcaattccctgaagagtatacgaaaaatctgtttaatgtccctgaaacatcttctaacttggatattaatagtgaatatactgctttccctgttgagaacagagacctgttccaagctggtttaacaacaattgtgccgatcatcggaggcggggaaagattaggaacacttattctttcacgtttacaagatcaattcaatgacgatgacttaattctagcagaatacggcgcaacagttgtcggaatggaaatcctaagagaaaaagcagaagaaattgaagaggaagcaagaagcaaagctgtcgtacaaatggctatcagctcgctttcttacagtgagcttgaagcaattgagcacatttttgaggagcttgacggaaacgaaggtcttcttgttgcaagtaaaattgctgaccgtgtcggcattacccgttctgttattgtgaacgcactcagaaagctggagagcgccggtgttatcgagtctagatcattaggaatgaaaggtacttatatcaaggtactaaacaacaaattcctaattgaattagaaaatctaaaatctcattaatcacaaaaagaaccctttttgagggttctttttttatttcaaataaaggaaatcaataagctttatttcctgggttgaaagtctttctatgtaataattttaataaattttgcatttttcttcaaaaagtttcaaaaatgccgaaaagaaaggagaaaaaacagaaattctgctattttcaggcttatatcaaggcgagaaatgtagttctaacaatctaggactttatacctagttgcaaaatagataattgtgaggacatttttttacacgaacttcatagactttatgcctgttatttcttacaataagcatatagttttacaattctcgacaaggatattgagggtgaaaaaaactgaaatggaggtaagtggatttgagcttattttctggaacgatacaaaatcttgaaaatgccttgagtagagcggatattaagcaaaaagtcataactaataatatcgccaatatagatacaccgaactataaggcaaaaaaagtctctttccaaaatttattagatcaagaatcctcgcgtcttgaagcgataaaaacagactatcgtcatgttgatttttctgatactgattcgaattattcaattgttgcgagcggagatacatcgtatcagcaaaacggaaacaatgttgatgttgacaaagagatgacagaattggcgcaaaatcaaatcaactatcaagctttggttgaaagaatgaacggtaaatttaattcgctgaagaccgtattaacaggaggaaaatgatgacagcttttcatagcttaaatgtttcagcatcggctttaacagctcagcgagtcagaatggacgttgtatcatctaacttagcaaatatggatacgacaagagctaagcaggtgaatggagagtgggtgccttacagaagaaaaatggtttcccttcagtcaaaaggtgaatcgttctcttctattctcaattctcaaatgagcggaagcgggaatgctggaaacggtgtgaaggtttcaaaaattacggaggatgattcagattttaatcttgtctatgatccgacagaccctgatgcaaacgctgaaggatatgtacaaaagcctaatgttgatccattaaaggaaatggttgatcttgtcagcagcaccagatcatacgaggcgaatgtcacggcgatgaatgccacaaagggaatgctgatgaaggcgttagaaatcggaaagtaggtgaatgaatgtgattaatgcaatttctccttttcaggttcaaaatactcaaaacactcaaaatgcaacaaatcaagtaaacaatagccaaaaaacagattcttcaaatcaaacaagcttttcggagcttttaaaaaactctattagttcgttaaatgagtcccaagtagcttctgacaacatgactaatgccttggctgcaggaaaagatgtaaatcttgatgaggtcatgatcgctgctcaaaaagccagcatctctctaactgcagcaacagagttccgcaataaagctgtggaagcttatcaggagattatgagaatgcaaatgtagggggtctgacgatttagagaaagagtggaatgaccgggggttaacatgaatcgtactctaatgcaaatgaaaaacaaaacgagtgagttttggaaaaatagatctaaattacaaaagattttaatggttagtgctttagcggcaattattattattggaattattattagtgtttttgcttcgaattctaaaatggcgccgctgtacaaagatttgtctgccgaagaagcaggacaaatcaaagaagaattggatgcaaaaaaagtgccaaacgaactttcgaatggcggtacagtgattagtgttccggaggatcaggttgattctttgaaagtgcagatggctgcagaaggacttcctaaaacgggatcaattgattattcgttttttggacagaatgccggctttggtttgacagacaatgagtttgatatggtgaaagtgaaagctacacagacagaactgtcaaacttgatcaatgaaatggacggtattaaaaattcaaaagtaatgattaatctcccgaaagacgctgtgtttgtcggtgaggagcaatctgcagcatctgcatcaatcgttttgcagattcaaccgggttatacacttgatcaaagccaaatcaacggattatatcatctggtatctaaaagcgtgccaaacctaaaagaagataacatcgtcatcatggaccaaaattctacatactacgacaaatcagacagcgatgcagggtcctacgcggatagttattcttctcagcaaggaattaagtctcaagttgaaaaagacattcaaaaacatgtacagtcattgctgggtacgatgatgggccaagataaagtcgttgtctccgttacagcagacattgatttcacaaaagaaaatcggacagaagacattgtcgaacctgtggataaagaaaacatggaaggcattgcagtcagcgctgaaaaggtatctgaaacatatcagggcgacggtgcagccaacggcggaactgccggaaccggcgaggaagatgtaccaaattataaggctgacggtgaaaataccgaaagcgggaactatgaaaaaaacagcaacaaaatcaattacgaggttaaccgaattcataaagaaatcgctgaaagtccttataaggtcagagatttagggattcaagtaatggtagagccgcctgatgccaaaaacacagcgtcgctatcaactgaaagacaggatgatatacaaaaaatcctttcaactgtagtcagaacatctttggataaagatgaaacgcaaaatcagaatttatctgatgctgatatcaataataagattgttgtttccgttcagccattcgacggaaaagtcaatttggatacaaatacggaaaaatcctctggtatcccgctgtgggcatatattgtaggcggtgttttaatcgcagcgattattgttctgatcattatgcttatcagaaagaaacgggcgcaagaggatgaatttgaggaatatgagtatgaggttcctcaagaacctatcaatttgcctgatatcaacgaagaggaaaatgaaacagcggaatcagtcagacgaaaacagcttgaaaagatggcgaaagacaagccggaagattttgcaaaactgctgagaagctggctggccgaggattaggaggaattagaaatggcgagacgtgatcaagataagcttacaggaaaacaaaaagcagccattctcatgatttccttggggttagatgtgtcagcttctgtctataagcacttaaccgatgaagaaattgaaaggcttactctggaaatatcaggtgttcgaagcgtcgatcatcaaaaaaaggatgaaatcatagaagaatttcataatatagccattgcacaagattatatttctcaaggcggtttaagctatgcaagacaagttctggaaaaggcgcttggagaggataaggcagagaacattctaaacaggctgacttcttctttgcaggttaaaccatttgattttgccagaaaagcggagcctgaacaaattttgaattttatccagcaagagcatccgcagacgatggcgttaatcttgtcttatttagatccagtgcaggccgggcagattttatccgagctgaatccggaagtacaggctgaggttgcgagaagaatcgcggttatggatagaacatctccagaaataattaatgaggtagaacggattctggaacaaaaattatcttctgcatttactcaggattatacacaaacaggcggaattgaagctgttgtggaagtgttaaacggggtagacagagggacagagaagacgatcttggattcattggaaattcaggatcccgatcttgctgaagaaattaaaaagcggatgtttgtcttcgaagatattgtcacacttgataaccgtgccattcagagagtcattcgcgatgttgagaacgacgatttgctcctttcattaaaggttgcaagcgaggaagtcaaagaaattgtattcaacaatatgtcacagcgtatggttgaaaccttcaaagaagaaatggaatttatgggccctgtacgcttgaaagatgtagaagaagctcaatcgagaattgtaagtatcgtcagaaagcttgaagaagccggtgaaattgtaatagcaagaggcggaggggatgatattattgtctaatatcattaaacaagaatcatctatttctccacaaaaggaaaaaagaaaactttctatacaagaggtgcgtattgatcattctcaccttttgcaggctgaagagaacccggaggcgcttatggcccgagtgaaagaggaagctgatcggatttctgagcaggcaaacagtcatatagaaaatattcgccgtcaaattgaacaggagaaaaacgattgggcggctgaaaaacagaagcttattgaagaagcaaaagccgagggctttgaacaaggagtagcgctgggcaaagctgaggcaatgaaacagtatgcagaactgatcggccaagcaaacagtataactgaaatgtccagaaaagctgttgaggacaagcttgaagacgctaatgaagaaatcgttgagcttgccgttgccctagcaaaaaaagtttggcagcaaaagtctgatgataaagaggctttcctcctgcttgtacaacaggttataaacgaagtgaaggaatatgacgatatatcaatttatgttgatccatattactatgagacaatctttcagcaaaaagatgaaatccagcagcttctttataaagaatgtcggcttggcatatatgctgatgaaaaagctcaaaaaggaacctgttatattgaaactccttttggcagggtagatgcgagtgttgacacacaattgatgcaattgaaagataaacttctgacagcgctggaagcaggtgcagctgaatgaagacacagagtctgatagattgtatagaaatgacagactcgtataaacggtacggaaaagtcaagcgggtcatcggcctgatgattgaatcaaaagggccagcaagctcaattggcgacgtgtgcctgatttatgcaaaaggacaatctgggaaagtcattaaagctgaggtagtcggcttccaggaagaaaatattttgcttatgccttatttagaggctgcgagcattgcacctggcagcattgtagaagctactggggaatcacttcgggttaaagttggaaccggactgattggacaagtcatcgatgcttttggagaaccgcttgacggaaaacttctgcctaaagggctttcgcctgtatcaacggagcaatcaccgcccaacccgatgaaacggccgcctatccgtgaaaagatgggtgttggagtcagatcaattgacagcttgctgacagtcggtaaaggccagcggattggaatttttgcaggaagcggtgtcggaaaaagcaccttaatggggatgatcgccaagcagacagaggctgacttaaacgtcattgcacttgtcggagaacgcggacgagaggttcgggagtttattgaaaaagatctggggaaagaggggctgaaacgatcgattgtagtcgttgccacctcagaccagccagcattaatgagattgaaagcggcatatacagcgactgcaattgccgagtatttccgagataaaggccaaaatgtcatgtttatgatggattctgttacaagggtggcaatggcgcagcgagagattggactggctgcaggagagcctccgacgacaaaaggttatacaccttcagtgttcgctattttacctcgtttactagaacgaacaggtgcaaacgagcatggaaccattacggcattttatacagtgttggtagacggggatgacatgaatgagccgattgccgatactgtacgcggaattttagacggacatattgtgttggacagggcgcttgccaataaaggccagtttcctgcagttaacgtactaaaaagcatcagcagggtgatgtcaaacatttcaacaaaacagcatctggatgcggcaaataaattccgtgaacttttatcgacatatcaaaattcggaagatctcattaatatcggagcttacaaaagaggatcatccagagaaattgatgaagcgatacaattttatccgcagcttattcaatttttaaagcagggaacagacgaaccggctttattggaagaaagcattgctgcattaactagtttgacaggaaatgaggaataaacgtggcttatcaatttagattccaaaagctgctggaactaaaagaaaatgaaaaagaccaatccttatccgagtatcagcaatcagtttctgaatttgaaaacgttgctgaaaaattatatgagaatatgagcaaaaaggaattgctggaacaaaataaggaaaagaaattaaaaagcggcatgagtgtacaagaaatgaggcactaccaacaatttgtctcaaatcttgataatacgatctatcactatcaaaagcttgtcattataaaaagaaatcaaatgaatcaaaaacaagaaattttgacagagaaaaacattgaagtgaaaaagtttgaaaaaatgcgtgaaaaacagtttaaaatgtttgctcttgaagataaagctgcagaaatgaaagaaatggacgatatttcgattaagcagtttatgattcaaggccattaggagcgaatgtaatgtccggcaaaaagaaagaatcaggtaagttccgttcggttttgcttatcattatcctcccgctgatgtttctattaatcgcaggggggattgttctttgggctgctggtatcaatgtcataaagccgatacaggatgctgcggcaaaaacgccggttcttaaagaattggtccctgaaaccgaaaataaaaaaggcgcagcatcaagtaaggatagcagtaatacggcagctctggaaaagaccattaaggatcaaaaaagtgaaatcagtatattgaataaagatttagaaacaagtaaatcagaaatcgataggctcaatcaaaagatccgttcacttgaaaagacggctgaggatcaaaaaaagtcatcagaagatcatactgaaggatcagcagactcgaaagcttcttctgaaaatgacaaagtgatcagtgtgtacaaaagcatggacagcggaaaggctgctaaaattattgcccaattaaaggagcaagaagcactgaaaatattgaatggcctaagcaaaaagcagcttgctgacatattggcgaaaatgactcctgagcaagcagcaacctatacagaaaaaattgctgccagccaagaatagggggaatgaaaggtgaagctgcttgaattagccggacctttgctgcaaaccacaacgggttctgccgctaaaaacatgaaaagtagccaaggagtttttcaaaactggcttatgtctgaggctggattgaaggaactttcagaacaaggaaagggtactcctaattccgaagatcagcttttagcagatgcgcttaaaaagatcggtgactggctaaatgcaagtcctgaagatcaagacaaacaaaatgcggatcttttgcaaacattaagcaaactgacagggaagcaattggatgcgaatgctctgcaaatgttgcaaaatcttttgcaagcagttgaatcaaaaatgtcaggcgggacggatcaattgctcacagaaacggagaaaatcttttcagaagctaaaacggctctgagtgccaatgattctgcttctgacattaatggagcactgaagtctgatacagagcaatcaaatcaggaaaatgaagtatccgagcctgctaaagagcttatctatatccagatgttcattagccagctcgtagaagggaataagctgactgatcgcgggaatggcaatgaagctcatgccatttaccaaaatggagatcaattcctttctgcattagaaaagaagggtgtatctcaacaactaattcaggatcttaaacagcaaatattcactaaagctgagtcaagttcaaaactttactcgatgacagcgtcagagctgaaaagttttcaaagcttaatggatcaaatgtctatgcttcctcaaaaagggaccaaagaatggagtttagctgaaagccagctgaaagccttcttgttatcgaaatcatccgaatcatcacaagactttgggaagcgtgttctcacaccgctctcgcagagttcatccagcaaaaatgcatcggatgtttctggaagtattcagcctgtagatagtaaatcaggactccaaatgctgttttcggggtatcggggcataggaggagttcaaacacttgatctgcagcagatgtcatctgatataccaaatgccgaaacaaaaacggtggctgatcaagtgattaatgcgtggaagcagatgaaatatacgcctttcggcagatcgacgggaagtttcactattcggctgaaccctgaacatttaggatttgtcacaatcaagctgacaaatgaaaatggaatgtttcagagtaaaatcatagcatctagccaatcagcaaaagaattgcttgaacagcatcttcctcagctgaagcaatcattgccgaatatggccgtccaaattgaccgttttactcttccggtccaaagcggggatcagccgatatacggccagcttgctgatgaacagaaacagcagcaagaggggcagagacagcaaagacagaaaaagcaatcaaatgattttggcgatctgctcgatgaagtgtcgatggttgaaatggaggaagaagaatgacttctataagttcagaatataaactgcctgaaaaaacgaacactgtgtcgacgaacaacagcagcttggggaaagacgagtttttaaaaatattaatgactcaagttcaaaaccaagatccgcttaacccgattgacgataaagaatttatcagccagatggcgactttttcaagcttggagcaaatgatgaatctgaatacgacaatgactcaattcgttgaaaaccaagatccgtttacaacgtatgttgattggatgggaaaagaagtatcttggactgatggtaaaagtgcaacagataaaacaggcacaataagctctgttaaacattttaaaggaaattattatctcgttcttgatgatgggaccgagatcagtcctgcgaatgtcatgtctgtgggacaatcatctaaataaaaacatctgggggaatatattatgttacgttcactttattctggaatcagcggtatgaagaactttcaaacaaagcttgacgtaatcggtaacaacattgccaacgtaaatacagtaggattcaaaaagagccgtgtgacctttaaagatatggtaagccaaaccattgccggcggttctgctgctggtgcaacaatcggcggaacaaactctaagcaaatcggtttaggttcatcatctggcacaattgatacaattcattcaacaagcgcgacacaaagcacaggaagaacacttgatttagcaattgacggcgacggttacttccgaattgatacaggtgacgggacagcttatacaagagcagggaacttctatttagataatactggaacactggttacaggtgatggctaccatgtactaaatatgaatggcggaacaattaaaattcctactgatgctcaaagctttagcattggttctgatggaaaggtgtcaattgttgatgctgaggggaaaacacaagacgggggacaaatcgggattgttacttttgccaacagtgacggcttagataaaatcgggagcaacctataccgtgaatctttaaactctggaacggccagtgcagcgaaccagcctggtgacggcggaactggtgctcttaaatcaggatttctcgaaatgtctaacgtcgatttaactgacgaatttactgaaatgatcgtagcccagcgcggattccaatcaaactcaaaaattattacaacatctgatgaaatccttcaagaactggttaaccttaaacgttaaggagggaggggaggcgagtaatcgcttctccgctgttttatgattaaagtaacccgtttgaacgggcagccctttacactgaatgcgctatttattgaacagattgaatgttttccggatactacaattactctgtcaaatggtaagaagtttgtagtaaaagaagatgaagaagctgttctggaaaagatcgcagctttctaccgaaaaatacaaatatttgcaatggatcaaggaatagaggaaccggaatgaagaaaaagttaatgatcatattactaattattcttatcgtaattggtgctctcggggcggcggcttattttgttttaggcggaaagtccgaaaaaagtgaagcgaaaaaaagtattgatgaaatcgttgcgtcttctgttgatgtagaagagatcacaacaaatttaaagtctgataacattatccgtcttgctattaaacttgaaactgattctgataaatcaaaagaagaacttgagaaacgtgatttccaagtgaaagacgctgttatatcactgctggctgatacgaatgctgatcagattgagggagacaagggaaaagaaacctttaagaaggaactaaaagataaaataaatagctacctccaagaaggaaaagtagaaaaagtgtatattacctcctttaatctgcaataaagcataatttgacagaatacggaggtgaggaaaatgtcaggagaagttctctcccaaaatgaaatagatgcactgctctctgcaatatcaactggtgaaatggacgctgaagagctgaaaaaagaagaaaaagagaagaaagtcaaggtttatgatttcaaacgtgcgctgcggttttctaaggatcagatccgcagtttaacgagaattcatgacaattttgcaagacttcttaccactcatttttctgctcagctcagaacctatattcacatatctgtcagttctgttgatcaggttccgtatgaggaatttatcagatcgattccaaacatgacgattctgaatctatttgatgttcatccgatggaaggaagaattatgatggaggtcaaccccacgatagcttatacgatgatggatcgagtcatgggcgggattggaatcagtcataacaaggttgacagtttgacagaaattgaaacaaaaatcatttctaatttatttgaaaatgcactgggtaattataaagaagcttggcagtcaattgctgatattgaaccggaaatgactgagtttgaagtgaatccgcaatttgttcagatggtatctcctaatgaaacagtcgtggtgatctcgctcaatactcaaattggtgaaatcagcggtgtcattaatctctgtatcccgcatattgtactcgagccgctcataccgaagctttcagtccactattggatgcaatcagaccgaaatgagccaaagcctgaggaaacaaagtcgcttgaaaaacgtatcatgacagcacaaatacctgtcgtggccgagctcggcacatctgaactgacgatagaagagtttttaagtttagaagtcggagactgcataactttggacaaatcagtcacggatcctcttactgtattggtcggagataagccgaaatttttaggacaagccggccgggtgaatcgaaaacaggcagtgcaaattttagatcacgacataagaggtgaacaagatggagaataatagattatctcaagatgagattgacgcgcttcttaacggtactggcagcacgcttgatgagccagagattccggaagtagatgacttatcggaaatggagcgtgatgcgatcggtgaaatcggtaatatttcattcggcagttctgcgacagcactgtcaacgcttttaaatcaaaaggtcgatattacgactccaagcgtaacggtcattccaagaagtaaaatcagcgatgcgtttcctgaaccgtatgtagcgattgaagtgaattatacggagggcttcagcggaagcaacctgttagtcgtggaacaaagtgacgcggcgatcattgcggacttaatgatcgggggagacggaaaaggtgcggacccttcactgggtgaaatccatttaagtgcggttcaagaagcaatgaaccaaatgatgggatcggctgccacatcaatgtctactgtattcagtaaaaaaattgatatttcacctcctcgggttgaattgctggatgttactgaagaaaagggtacagaccgtattcctgatgatgaaatgctggtgaaagtttctttcaacttaaaggtgggagaattaatagactccagcattatgcaactttacccattgacatttgcgaaagatttaatttcaagccttatgaactcagaaagtgcagaggaagaagaaacggtgcagcctgaagttacatacgaacagccgaaagagcctgtgacgccagagccgcgtattgaaccgaagcaacagcagcagccgccaaaaaggcagggaacagcaaaaaaagcagcgccagttcaggtttcaccggtggaattttccgcgtttgatccaaacgaagctgtacaagcccctattcataatctggatatgcttttggatatcccgctttcgattactgttgagcttggcagaacgaagagaagcgtaaaagagattttagagctttctgccggaagtattatcgagcttgataaattagccggtgagcctgtagatattttagttaatcagcgtatcgttgccaaaggcgaggtcgttgtcattgaagaaaacttcggagtaagagtcactgacattttaagccaggcagagcgcattaataatttaaaataacgaaacacaaggagagagatagattatggcacatagaattttaattgtagatgacgcagcatttatgcgaatgatgattaaagatattttagttaaaaatggttttgaagttgtggcggaagctgaaaatggagcacaagcggtagagaaatataaagagcattcacctgaccttgttactatggatatcacgatgccagaaatggatggtattacagcattaaaagaaattaaacaaattgatgcgcaggcaagaatcatcatgtgttctgctatgggacagcaatcaatggttattgatgccattcaggccggcgctaaggatttcattgtgaaacctttccaggctgaccgtgtgcttgaagcaatcaacaaaacattaagttaaagggtgtacgactgttgaaaaagagtcaatattttattgtttttatttgttttttcgttttattcagtgtacatccgattgctgctgccgcggcagactctgataattcaactgtaaacgaatggtttcaaaagaaagatgaaaaaactgcagatcaatcagagcaaaagaaagaaaaaacaacaaaaactgctgatgagacggagggagcggctgctccttctgtctcagcttttgattttgtaaagatgattttcgctttattgtttgttatcgcgctgatttacgggctggttaagctcatgaacaaaagaaatcggctcctaaagccttttcaatatgttgaaaatattggcggcacatcggtcggccagaacagatccatacaattgatcaaggtcggaaaaagtgtgctcatcgtcggtgtaggagagacgatccagctgctgaaagaaattgaggatgaaaaagagattgaagtcattctcagtcagcatgaagaggcaatgtcaagcaaaatagagtggcaaaagtttgtgaagccgcttaagagttctgaacatcagccgcagcaaaaactgccttcattttcaaaagcattaaaagagcaacttgaagagttaaaacaaaaccgttctgaaggaaagaagaaaggcccacgtcatcatgaatgagtttataaatattttcagttcaagcgatccggaaaacgtaagttcgactgttaaattactattattgttaactgtattttcagtggcgcctggaatattgattcttatgacttgttttactcgcatcgtcattgttctgtcatttgtcagaacttcacttgcgacgcaatctatgcccccaaaccaggttctaatcgggcttgcgctgtttttaacattttttattatggctcctactttttcagaaattaataaagaagcgctgaccccattaatggacaacaaaatcagcttggatgaagcgtatacgaaagctgaggaaccgattaaagaatttatgagtaaacacacaaggcagaaggatctggcgctgtttatgaattacgcgaaaatggataaacctgaatcattaaaggatattccgttaacaacaatggttccggcttttgccatatcggagcttaaaacagcatttcaaataggttttatgatttttatcccttttttaattatagatatggtagtggcgagcgtcttgatgtcaatgggaatgatgatgctgcctccagttatgatttctctgccctttaaaatattactttttgttttggtagacggctggtatttaattgtgaaatctttgcttcagagcttttagggtaggtgctaaacgtgagttcagaatttgtaatttctatggcggaaaaagccgtatacgtaacgctgatgatcagcgggccattattggctattgctttactggtcggtttaattgtcagcatatttcaggcgacaactcaaatccaggaacagactttggcgtttattccgaaaatcgtggcggttctcctggctctcattttttttggtccgtggatgctgtcgacgattctttcatttacaacagagctgttttctaatttaaatcgttttgcagggtaatgtagagatgaattcaattattgacttatttcctgcttttttattggtttttattagaatctctgctttttttgtaacgattccgctatttggacatcgaaatgtgccagctgttcatcgcataggttttgctttttttcttgcggtcatttgtttcagcaccattgataaaccgccctctttggagatagatgagcactatatgcttttggcgtttaaagaagctttggtcggcctatgtctgggtttaattgcttatatgatgattgccgcagtgcagattgccggctcgtttattgattttcaaatgggattttcaatagcaaacgttattgatccgcaaaccggtgcacaaagtccgttgattggccagtttatctatacgatggcacttttgtttatgctaagtgtcaatgcccaccatttgttgctggatggtatttactacagctttcagtatatttcagttgatcaggcatttccgaatttcggcgatgaaaagtttgcctattttattgcgaaaagctttaatgcaatgtttattatcgcttttcaaatgtcagcgccggttgtggccagtttgtttctagttgatttagcattaggtatcgtggctcgaactgttccgcagttaaatgtatttgtggtcggtctgcctttaaagatcgctgtcagtttcattatgctcattgtatgtatgtccgttatcttcgtcgttgtccggaatgttttcagtttaacgattgaaacgatgcggaatcttttagcattggtcggtgtttcttaatgaagcttagagttgacctgcagttttttgcgggagagaagacagaaaaagccactccgaaaaaacggaaggatacgcgaaaaaaagggcaggtagccaaaagctcggatgtcaataccgccgtttctttactggtaatattcctttcgcttattgcaattggtccgtatatgagagacaggctgctgtcattcatagaaacattttataccgaatcgctcacaatgaagctctcagaatcaaatgtgcatacattgtttgtcagcttattaaaggatatgggcatgatactcgcaccgatcttgctagttgctcttgttgcaggagtcgtaagcaactatatgcaggttgggttcttattttctgctgaagtgatacagcctaagcttgaaaaactggatccgatcaaaggctttaaacgaatatacagtatgagggcgattgtagagctgattaaatcaattttgaaaatcgtagtcgttggttttgcggcttttgctgtgctttggctgcattatggagaaattctccggcttcctctcctgacacccgaagaggcactttctttcgtttcaaaactcactttgtggatgggactaagcggtgcaggtgcattgttgattcttgctggtctcgactatttatatcagagatttgactatgagaaaaatatcaaaatgtcaaaacaagatataaaagatgagtacaaaaaatctgaaggagacccgattatcaagtctaaaattaaacaaagacagcgggaaatggcgatgaggcggatgatgcaggaagttccaaaagcagatgtcattatcacaaacccgactcactatgcgattgctttgaaatatgatgaagaaaaaatggacgcaccttatattgttgcaaaaggcgtcgaccaccttgcgttaaaaatcaggaaaattgctaaagagcatgatgtcatgatggtagaaaacagaccgcttgcccgtgcgttatatgatcaggtggaaattgaccaggcagtgccggaagaattttttaaagttttagcagaaattctggcttacgtatataaaacaaaacaaaaagtatattgaatttttcgatttaaaaggagagaaaaaacagcatgtcaacaagagatttatccgttttaataagtgttgtcctcattgtggcgatgctggtgattccatttcctccatggctgttaagtattttgatcattattaatatttctcttgcattgatcgtgcttctcaccacaatgaatatgcaggaagcgcttcagttttcgatttttccgtcactgttgctgcttttgaccctatttcgtttgggcttgaacgtctcaactacccgttcaattctttcacacggtgaaggaggtaaagtcgtcgagactttcggaaatttcgttgtcggcggaaatgtattagttggactcgttgtatttatcatccttattattattcagtttatcgtcattacaaaaggtgctgaacgtgtttccgaggttgcagcaaggtttacgctggacgcaatgcctgggaagcagatgagtattgatgctgatttaaacgcagggatgattaccgaacaggaagcgaagcatcgccgcgaaaaagtggcaagagaagcagacttttatggagcaatggacggtgccagtaaatttgtaaaaggtgacgccattgccggaatcatcattgtgatgatcaatattattttcggaatcgtgatcgggatgcttcagcagggcatgtccattcaagaggctgcttcacactttacgatgctgactgtaggggatggaattgtttcgcaaatcccggcactgttaatttctacggctacgggtattgtggtcacaagagctgcctctgaaggaaacttagggcatgacattacaggccagctgtttgcgtatccaaagcttttatacgtcgcagcagctacgatcatgcttttaggtattttcactccgatcggcatccttctgacggggccgcttgcgggattgcttgcttttggcgcatatacactatctaaatcaggtaaggaaaaagaagaagtggatgagattcttgaggaagaggctgaggtggacgagcttaaaagccctgaaagtgttgttcagcttctgcatatagatccgatagaatttgagtttggatatggcctgataccgcttgctgatgccaatcaaggcggtgatttattagaccgaattgttatgatacgccgtcagttggctttggaactcgggcttgtcattcctgtcgtgcgaatcagagataatatagcgttgcagcctaatgaataccgattgaaaattaaaggaaacgaagtagcaaaaggcgagttgttgcttgatcattatttagcgatgtcgcctactcctgaggacgatctcattgaagggattgaaacagtggagccttcattcgggctgccggctaaatggattagcgaagcggtaaaggatgaagccgacatgcttggttatacagtagttgatcctgcatcagtcgtttcaacgcatattacggagaaaattaagcagcatgcccacgaattgatcggaaggcaggagacaaaacagctgatcgatcacttgaaagaatcgtatccagtcctggttgaagaggttacgccgaatccattgtctgtcggtgatattcagaaagtgcttgctaagcttttaaaagaaaaagtttcaattcgaaacttagtaacgatttttgaaacacttgctgactatgggaaattaacaacagattctgatcttttgacagagtatacaagacaagcgcttgctaaacaaattacagcccagtttgccaaagaaaatgaagtgttgaaggttgttacttgttccggccgtgtagaaaaagcaatagcagacggtgtgcagcagacggaacacgggaactatttatcacttgaaccagatatttcagaaagtatagtgcgctctgtcgccaaagaagctgaacagctctcattacgtcaggaaaccgcgattcttctttgctcgccgcctgtcagaatgtatgtgaagcagcttctggaacggtacttccctgatcttccggtactctcttataacgaacttgaggcgaatgttgaggtacaaagcattggagtggtggatatttaatgaaaataaaaaaatttactgctgcttcaatgcaagaagcggcacttctcatcagaaaagagttaggtaatgaagcggtcatattaaattcgaaaaaaattaaaaagcgaaaatggtttggcctcgtcaacaagcctgctgttgaagtaatcgccgtattggatcaggactttcttgagaaaaaaacgcctcagaaggcagctgaaccgaaacaaacattaaaaactccggtcagcagtccaaaaatagaggagagaacatatccccctcaaattccggcgcaacaggagctaggtgatttttcagcatatcaatctgtacttcctgagccgctgcgaaaagcagaaaagcttttgcaagaaacagggatcaaagagtctacgaaaacgaacactctgaaaaaattgcttcgcttctctgttgaagcaggcggcttgactgaagaaaatgttgtcggcaaacttcaggaaatactatgcgatatgctgccctcagcagacaagtggcaggagccaattcattcaaaatatatcgttctctttggttcaacaggggctggtaaaacaactacactggctaaactcgcagccatatctatgcttgaaaaacataaaaaaatcgcttttattacaacagatacgtatcgtattgcagctgttgaacagttgaaaacatacgctgaactgctgcaggctcctctggaagtttgctatacaaaagaagaatttcagcaggcgaaggagctattttctgagtatgatcatgtgtttgttgatacagctggaagaaacttcaaagacccgcaatacattgatgaactgaaagaaacgattccttttgagagcagcattcagtcatttcttgttttatccgcgactgcaaaatatgaagatatgaagcatattgtcaaacggttttcatccgtccctgtcaatcagtatatttttacgaaaatagatgaaacgacttccttaggttctgtatttaatatactggcagaatcaaaaataggtgtcgggtttatgactaacggccagaatgtgcctgaggatatacagactgtatctccacttggttttgtgaggatgctgtgcagatgaacagatatgaccaagcagcaactttacgggcgaaaatggaaaaacgtgagcgcgttctgccaatggtttattcacaaaaagcgaagacacttgctgtcatcagcggcaagggcggtgtcggaaaatccaatattaccttaaatatggcacttgcgctgcaggataaaggtaagaaggtgctgctcatcgaccttgatatcgggatggggaacattgatatattaataggaaattcatcgtctgccacgataatcgatgttttaaccgatcgtcagcctttgctgcagtcattatccgttggcccaaagggtttgcggtatatatcagggggaaccggtcttgatgtgatgtttcagctcgatcagagaaaatggacgttttttgccaatgaactttctcatgcattaagccagttcgattatgtgctgtttgacatgggagcaggcttatcaaaagatcaactgccttttattttatcagcagaagatattttgattattacaactcccgagccgacggccattatggacgcatacagcgctgtcaagcacttggttttgacagaaaataagctttcaatgaaggtggctgtcaatcggtgccgtgaccaaaaggaagggcttgacgcttttgcccgcctctcccgtacaattcatatgtttttggatgttcaggttcagtttgccggttccgtttctgacgatgtgatcgtgagcaaagcggttgtcgaacaggttccttttttcataaaaagccctcaggcaaaagccagccggtcagtccgtattttagcggacgccttgtttgaaagagaagaaacgagacacaaagaagacaaacagacatttattgagaaattatcttcttttttaatgaggagggcttaatttgattcgtgtgcttgtagttgatgattcagcttttatgagaaaaatgataagtgattttctgaccgaagaaaagcagatagaagtaatcggaactgcgagaaacggagaagaagcgcttaagaagattgaattattaaaaccggatgttattactcttgatgttgaaatgccggtcatgaatgggacagatacgctccgcaaaattattgagatttataacttgccggtcattatggtgtctagccagaccgagaaaggtaaagaatgcacaattaattgtttggagatcggtgcctttgactttatcacaaagccatcaggctcaatatctctggatctatacaaaattaaagaacaactagttgagcgtgtcgtcgcggcaggactttccggcaagcggaaacgtcctgtttcccagacagttcggcccgaacctattgtgcgtgctgtcgttaagcctgaattaagcaaaccgaaacctggcacgggcagacaaattgtgtgtatcggcacatcaacaggcggtccacgggcgttacaaaaggtgataccgaagctccctaaggatttgaacgcaccagtggttgtcgttcagcacatgcctgaagggtttactgcttctttggctgatcggctgaatcatttatctgacattcaggtaaaagaagcaaaagatggtgaagcagctcttaacggctgtgtttacatagcaccgggcggaaaaaacatatccgttattaaaaacagcgaaggactccaggttgtgcttgataaccatgacacaccaagccgtcataaaccatctgctgattatttattccgttctgtcgggaaactgacagattatgaaaaagtagcggttatcatgaccggaatgggcagtgacggcactgctggactaaaggacatgctaacagccggcaatgtgaaagccattgcggagtctgaagaatcttgtgtcgtatacgggatgccaaaagctgctgttaaagcgggtctcattcatgagattaaacatgtggaagatatcgcagcatccatcacaagctgtgtgaaaaaagagagggtgtgattcaaatggatatgaatcagtatttagatgtctttattgatgagagtaaagaacatttacaaacatgtaatgaaaagcttcttcttttagagaaagacccgactgatcttcagctcgtacatgatatattcagggctgcccatacattaaaaggaatgagcgcaacgatgggctacacggatttagcacatcttacccatctgcttgaaaacgtgctggatgcaatccgaaacggagacatggaagtcacctcagactggctggatattttgtttgaagctctggatcacctggaagcaatggttcagtctattattgatggcggggatggtaaaagagatatctcagaagtgagtgccaagcttgatgtgaatggtgcgcacgctgaatccgctgcctccgctgaacctgcagaagcacagagttcagcatctgattgggaatatgatgaatttgaacgcacagttatacaagaagcggaggagcaaggcttcaaacgatatgaaatcaagatttctctgaacgaaaactgtatgttaaaagcagttcgtgtctatatggtgtttgaaaaactaaatgaagtcggagaagtagccaaaacaattccaagtgctgaagtgcttgaaacagaagattttggaactgactttcaagtttgtttcttaacacatcaatcagcggaagacattgaacaattaatcaatggcgtgtcggaaattgagcatgttgaagtcattcaaggggctcctttaacatcagctgaaaagcctgaagaatctaagcaagaagattcaccagcagcagctgtacctgcgaagcaggagaaacaaaaacagcctgctaaaaacgatgaacaggcgaagcattcagccggcggatctaaaacaattcgtgtcaacattgacaggcttgattctttaatgaacttatttgaagagcttgtcattgaccgcgggcgtctcgagcagattgcgaaagagcttgagcataatgaactgactgaaacggttgaacgaatgacgagaatttccggagatttgcaatcgattattctgaatatgagaatggtcccggttgaaactgtttttaacagattcccgagaatgattcgccagcttcagaaagagctgaataaaaaaattgaactctcgatcatcggtgcggaaactgaactggatcgtacagtaattgatgaaatcggagatccactcgttcacttgatcagaaacagtattgaccatggtatcgaggcgccggaaacacgtttgcaaaagggaaaaccggaatcaggaaaagttgtgcttaaagcttatcacagcggcaaccatgtctttatcgaagtagaggatgacggcgcaggccttaatcgaaaaaaaattctggaaaaagcgcttgagcgcggggtcataacggaaaaagaagctgaaaccttagaagacaaccaaatttacgaattgatttttgctccggggttctcaactgctgaccaaatttctgatatttccggccgcggtgtaggacttgacgttgtaaaaaacaaactggagtctcttggcggttcagtcagtgtgaaatcagccgagggtcaaggctctctattcagcatccagctgccgcttaccttgtctattatttcagttctgctgattaagttggaagaagagacatttgccattccgatttcttcaatcattgagacagcagttattgacagaaaagacattttgcaaacgcatgaccgtgaagtgattgactttagagggcatattgtccctgtcgtttatttaaaagaagagtttaaaatagaagatacaagaaaagatgcggaacagctccatatcattgtcgtgaaaaaaggcgacaaacctactgcatttgtggtggactcctttattggccagcaggaagttgtgctgaaatcactcggagattatttaacaaacgtctttgcaatttccggagctactattttaggagacggagaagtagcgctcattattgattgtaatgcactgattatttaaccattcgaggaggtgtctcacatgactgcagaaattaaaacaggcgaaaaaatgatagtctttatggtaaatggcaaagaatatgccatttccgtcactcaggtgaaatcaattgaaaaatggcaaaagccaacgagggtacctggcgtcgaaccatatatttgcggggtaatcaatttacgcggggtggtgactccggttattgatttaagaaaacgcctgaatttgccagagtatgaaattacagatgaaacacgaattatcattattgcttatcgtgatattgaagtcggctggattgtggatgaagcgaatgatgtgattaccgtacacgaaagtgaaatagaatctgctccagaaggcgttcagaaagatacggatgtgtcgatcgaacagattgtgaaacaagagaacagactcttaaatattattgatgcgaacgcggttttggataaagaatcatctcagtccgctgtgcccgatcaagcttaatcttaaaggggttatgacatgagtatttttaatggaatcaaagaagagcagatggacattttgcgggaagtcggcaatataggcgccggccactccgcctctgcaatggcccagctgttaaatagaaagatagatatggaagtcccatttgcaaagctgctgtcttttgatgagcttgttgattttttcggcggcgccgatgtcccggttgccagcatctttttaagaatggaaggcgatttaacgggttcaatgttctttataatgcctttttttcaggcggagcagtttatcagagagctgattggaaaccccgattttgacatagaggacttaggtgaagaccacatgagctcatccgctttgcatgaactgggcaatattttagcggggtcatatttaacagctttggcggatttgacgaaactccagctctatccaagtgttcctgaagtctctttggacatgttcggagcagtgatcagcgaagggctgatggagctcagtcaggttggagaacacgccattgttgtcgacacgtcaatttttgaccaaagccatcagcaggagctgaaagcgcatatgtttatgctgccggactatgattcatttgaaaagctctttgtcgccttaggtgcatcattatgagtacaactgaggctgttgttataaaggttgggattgctgacgtgaagatcgcccgcttcccggataccatccggacctctggtttgggctcatgtgtggggctggtgctttatgataaagaaaagcaaacggcgggtcttgttcatgtcatgcttccggattcgacgttatcgaaaactgccgagctcaaccgggctaagtacgctgacaccgccgtacagaccacgattgatatgctgatagaagcgggatgccggaaatttgcattaaaagcaaagctggccggcggatcagagatgtttaaatttaaatcgacaaatgatttgatgaagatcggaccgagaaatgtattagcgataaaagaacagctgtctttatttaatattcctattattagtgaagatacgggcggctcaagcggccggacgatagaatttgaaccgaagtcctgcatgctgcatattcgaactgttaaacaaggtgaaaaaacgatttaattaaggtattagggggataacaatgcaatccttgaattatgaagatcaggtgctttggacgcgctggaaagagtggaaagatcctaaagccggtgacgacttaatgcgccgttacatgccgcttgtcacatatcatgtaggcagaatttctgtcggactgccgaaatcagtgcataaagacgatcttatgagccttggtatgcttggtttatatgatgcccttgaaaaatttgaccccagccgggacttaaaatttgatacctacgcctcgtttagaattcgcggcgcaatcatagacgggcttcgtaaagaagattggctgcccagaacctcgcgcgaaaaaacaaaaaaggttgaagcagcaattgaaaagcttgaacagcggtatcttcggaatgtatcgcccgcggaaattgcagaggaactcggaatgacggtacaggatgtcgtgtcaacaatgaatgaaggtttttttgcaaatctgctgtcaattgatgaaaagctccatgatcaagatgatggggaaaacattcaagtcatgatcagagatgacaaaaatgttccgcctgaagaaaagattatgaaggatgaactgattgcacagcttgcggaaaaaattcacgaactctctgaaaaagaacagctggttgtgagtttgttctacaaagaggagttgacactgacagaaatcggacaagtattaaatctttctacgtcccgcatatctcagatccattcaaaggcattatttaaattaaagaatctgctggaaaaagtgatacaataatgaatttcatggttagcgagtgaaaaacatgtcaacactattatggcttttaagctttacgctccacggcgttcttctgtacgctgtcattatcctgtatacgaggctcgctgcagtgaaagaaacagaaaaacagcaaaaacagatacttgaagagacggaaaacaccttggcggcatttctgcttgaattaaaagaagaaaatgagaaactgatagaaaataaagcttcatctgcaagtcaatacgatgaagaatcccaaaagccaggccttcagccctctgaaacatatcaagagcgggatccagtccaagaggcagagaatcttcctgaacatattgaaggtctgattacagaggttgaccgtcgggaagagatcgtaaacagtgaggtccaatcatttgaagaccaggtcatagaattatatgaacagggatattcggcaagtcaaattgcccagaaaatgaagagcggaaagacagaaatcgagctatttttaaaatttcgctccaaaggtgtaaaggattcttgattgtcggataaagctgtgttatattatgtcttggtgttaaatacacacgcttaacgatttatgcagagggtgctgcaggcggcagttctgcacaaaaatgacctaagcggaggaaaaaaaccattatattaggaggaaataacatgtcagtcatttctatgaagcaattgcttgaagctggtgttcacttcggtcaccaaacacgccgttggaacccaaaaatgaagcgttacattttcacggagcgtaacggaatctacatcattgaccttcaaaaaacagtcaaaaaagtagaggaagcttacaacttcactaaaaatcttgctgctgaaggcggaaaaatccttttcgtcggaacaaaaaaacaagctcaagattctgttaaagaagaagctcaacgctctggcatgtactatgtcaaccaacgctggttgggcggtacattaacaaactttgaaacaatccaaaaacgtattaaacgtcttaaagacattgaaaaaatgcaagaaaacggtacgtttgatgtacttcctaaaaaagaagtcgttcaattgaaaaaagaattagagcgtcttgaaaaattcctaggcggaattaaagatatgaaggatcttcctgatgcattattcatcatcgatcctcgcaaagagcgcatcgctgttgcggaagctcgcaaattaaacatccctatcatcggtatcgtagatactaactgtgatccagatgaaatcgatgttgttatcccagcgaacgatgacgctatccgcgctgttaaacttctaacttctaaaatggcagatgcaatcttagaagcgaagcaaggcgaagaagaagcggaagttgctgaagaaactgcaccagaaacagaaacaacaactgcgtaacctattcaaaaggtgataagagggactgccttttatcaccttttttcaagaaaaatgtgtaatatacatactcttgtttaaacatataaggaggaatacaaatggcaattactgcacagcaagtaaaagaactgcgtgaaaaaactggcgcgggcatgatggattgtaaaaaagcgttaactgaaactgacggagatatggacaaagcaattgaccttttaagagaaaaaggaattgcaaaagcagcgaaaaaagctgaccgtatcgcagcagaaggttctactcttattaaaactgacggcaacaaaggcgttatcctagaagtaaactctgaaactgatttcgttgcgaaaaacgaaggttttaaagagcttcttaacactttagctgaccaccttcttgcaaacacgccagctgatgttgaagaagcaatgggccaaaaaatggaaaatggctcaactgttgaagagtacatcacaagcgcagttgctaaaatcggtgagaaaatcactcttcgccgctttacagttcttacaaaagacgacagctctgcattcggtgcgtaccttcacatgggcggccgcatcggtgtattaactgttctcaacggtacaactgatgaagaaactgcgaaagatatcgcaatgcacgttgctgcagttaaccctcgttacatttctcgtgatcaagtatctgaagaagaaacaaatcatgagcgtcaaatcttaactcagcaagccctccaagaaggcaaacctgaaaacatcgtagcgaaaatggttgaaggccgtctgaacaaattcttcgaagaaatttgtctattagaccaagcgttcgttaaaaacccagatgaaaaagtgaaacaagttattgcagcgaaaaacgctactgttcaaacttttgtccgctatgaagttggagaaggcatcgaaaaacgtcaagaaaactttgctgaagaagtaatgaaccaagtgaaaaaataatggtgaaaagatttcgcggctaagtcgcgtcttttcaggcagtataggggacacattttgtgttccctatttttaaaactatatttacaaacctttttttctcttgcataatagaaaacggcaatgtttacacttggaggttatcatggaaaaaccaaaatacaaacgtatcgtattaaagcttagcggggaagcattggcaggagaacagggaaatggaattaacccgactgtcattcaatccattgcaaagcaagtgaaggaaatcgctgagcttgaagtcgaagtggctgttgttgtaggcggcggcaacttatggcgcggaaaaacaggaagtgacctgggcatggaccgcgcgactgctgactatatgggaatgctggcgacagtaatgaattcgcttgctcttcaagacagcttggaaacactcggaatccagtccagagtgcaaacatccattgaaatgagacaagttgctgaaccgtacataagaagaaaagcgatacgccacttagagaaaaaacgtgtcgttattttcgctgcgggcacaggaaacccatatttctcaactgatacgacagctgcactgcgggctgctgaaattgaggcagacgttattttaatggctaaaaataacgttgacggtgtgtataatgctgatcctagaaaagatgaatcagctgttaagtatgaatcactttcttatcttgacgttcttaaagacggcctggaagtcatggattcaacagcttcctctttatgcatggacaatgacattccgcttatcgtcttttctattatggaagaaggaaatatcaaacgtgccgttatcggtgaatcaatcggaacgatcgtgagggggaaataacgtgtcaaaagaagtattaactcaaacaaaagaaaaaatggaaaaagcaattgctgcttatcagcgcgaattggctactgtacgcgcaggccgtgcaaatccatcattattagataaagtaacggttgaatattacggagcgcagacacctttaaatcagttgtcttctattaacgtgcctgaagctcgtatgctcgttatcacaccatacgataaaacagcaatcggcgatatcgaaaaagcgattttaaaagctgatttaggtcttacaccaacaagtgacggcaatatgattcgaattgcaattccggcactaacagaagagagacggaaagaattagtgaaagttgtaaaaaaatatgctgaagaagcaaaagtagctgttcgtaacgttcgccgtgatgctaacgatgatctcaaaaaacttgagaaaaacggagacattactgaggatgaactgcgtgcttccactgaagacgttcaaaaactgacagatgaatatgtgtcaaaaattgacagtgtcacaaaagacaaagaaaaagaaatcatggaagtttaatgaaaaactatgtacaatagataatagtgaaaagaccctctcatgtttacagggggtttttttgttaatactgttgattacattgattatcagcagggaatgtaacctttttgggtgacggaggaatctcatgctcaacatactcaaaaattggaagaatcagcaaactgcggcttccaacttagaacgttatacaaaagaagacatacttaagggagaaattcccgaacacatcgccattatcatggatggaaatggccgttgggctaaaaaacgctctcttcccagaattgcaggccaccatgaagggatgaaggtggtaaaaaggaccacgaagctcgcaaacgaattaggtgtcaaagtactgacattgtatgcattttcaacagaaaactggaaaagaccgaaaatggaggtcgattttttaatgaagcttccggaagaatttttgaatacgtatcttccagagcttgttgaggaaaatgtacaggttcggatcattggggatgaaacggctttgccggcgcacacattacgtgcgattgaaaaagctgtacaggacacggcgcaaaacgacggaatgatccttaattttgctcttaactatggaggccgtactgaaattgtcagtgctgcaaaatcactcgcggaaaaagtgaaggaaggctctttgaatattgaagacattgatgaatcgcttttttctacttatttgatgactgaatctttgcaggatcctgaacttttaattcgaacgagcggcgagataaggctgagtaattttatgctatggcaggttgcctacagtgaatttgtctttactgacgtcttgtggcctgactttaaagaagatcacttcttgcaggcgttaggagagtttcagcagagaggccggaggtttggcggaatttagaggatggtggacatgaaacaaagaattttgacaggtgttctggcagcaattgtatttttatttttggttattgtcgggaaattgccgttcaccatattaatttatgctatgagcagtgtggcgctttttgaacttttacggatgaaaaagctgaagctggtttcactgcctggtttgatcggtcttttattattgtggatgttcttattgccaagccagtattcgttttttgaagcggacgggatttccaaaatggaaatagctttatttgcggtactgctattgctgacttacacagtgttggtcaagaacacctttacttttgatgaagtcgggtttattacgcttgcagcaatttacatcggaatgtgttttcattattttatcgaaatcagaaatcttgaccaatacggattaacatacattttttatgcgtgtgttgtcatttggtccaccgattccggtgcctattttgtcggtaaatcgcttgggaagcggaaactgtggcctgaaatcagtccgaataaaacagtggaagggtttgcaggcggaattgtcatcgcacttgtattggcgacgatttttcagcttgttgcacaacttccgatcccgtatatctatctgctgttgatcacgctgtttttgtctgtttttggacaactgggagatttagtggaatccgccttgaaaagacattacgatgtaaaggattctgggaatattcttcccgggcatggcggtatattagaccgttttgacagtttcttgtttgtcatgcctttcttgtactttctgcttgcccttttttcataaaaaagtctaatatgaatatgagactgatcatgcagcaataagaataggagtagtggcaactttgaaaaatatttgtcttttaggagcaacaggatcaatcggcgaacagactcttgatgtactgcgtgcacatcaagaccaatttcagctggtatctatgtcgtttggcagaaatattgataaggccgttccaatgattgaggtctttcagccgaagtttgtctctgtcggtgatctggatacatatcataaattaaaacaaatgtctttttcttttgaatgccaaatcgggctgggagaagaaggactgatagaagcagcagtgatggaggaggttgacattgttgtcaacgctttgcttggaagcgtcggtcttatcccgacattaaaggcaattgaacagaaaaaaacaattgcgcttgcaaataaggaaactcttgtcactgcagggcatatagtaaaagaacatgctaagaaatatgatgttccgctgctgcctgttgacagtgagcattcagccatttttcaagctcttcaaggcgaacaggctaaaaacattgaacgcctcatcattacggcatccggcggaagttttcgggacaagacgcgggaggagctcgaatcagtaacagttgaagatgcattaaaacatccaaactggtcaatgggtgcaaaaattacaattgattcggctacaatgatgaataagggattagaggtgatcgaggcacactggcttttcgatataccttatgaacaaattgatgtggttttacataaggagagcatcatccattcaatggttgagttccatgataaaagtgtgatcgcacagctcggaactccggatatgagagtccccattcaatatgcgctcacttatcctgaccgattgccattaccagatgcgaaaaggcttgaattatgggaaatcggcagccttcattttgagaaagctgattttgacaggttccgatgcttacaatttgcttttgaatcaggtaaaataggaggaacaatgccgacagtgctaaatgcggcaaacgaagtagctgtcgctgcctttttagctggcaagataccgtttttggctattgaagactgtatcgaaaaggcactaacccgccatcaattactgaaaaaaccgagcctggcggacattcaagaagtggacaaagatacccggggatacgtcaattcaatactcacataaggtggtatgttcgtgaatacagttatagcgtttatcattattttcggaacgctcgttttcttccatgaactgggccatttattgctagcccaaagagcgggaattctctgccgtgaatttgcgatcggcttcggtccaaagattttttctttcaaaaaaaatgaaacagtttatacgatcaggctgcttccggtcggcggatttgttcgtatggccggcgaagatccggaaatgattgaggtgaaacccggatacacggtcgggcttctgtttaataaagaagatcaagttgagaaagtcatcatcaatcaaaaggaaaaatatccggatgctttagtcattgaagtggaaacagcggatctagagcatgacatgaagatcactggttatgaacaggggaaagaggacgaactttccagctttactgtcagcgaaacatccttttttattgtagacggagaagaagtgcagattgcgccgtataatcgccaatttggttccaaacctgtatggcagcggattaaagcaattgctgcagggccgattatgaactttattttagcttacgtcattttagtgatgcttgggctgattcaaggcgtaccgtcaaatgaacctatgctcgggcagctgacagacaatggacgggcggctgaagcagggctaaaagaaggggattatatccaaagcattaacggagagaaaatgaggtcttggactgacattgtctccgctgtaaaagaaaacccggagaaagaaatggacgttgcagtaaaaagagataacaaaacgcttcatatttcggtgactccggaagctgttaaagatgagaacaaaaaaacaatcggacgtttcggttcctatgcgccgactgaaaaaggcgtactctcagcggttgcttacggcgcgacatcaacagttgatgtcaccaaagccattttaaccaatctgagcaaattagtaacaggccaatttaaactcgatatgctgtcaggtcctgtcggcatatatgacatgacagaccaagtggcgaaaacagggatcgtgaacttatttcagtttgcggcgtttttaagcattaaccttgggattgtcaacctgcttccgattccggcacttgacggaggaagactgttgtttctatttattgaagcgattcggggcaaaccgattaacagggaaaaagaagcatttgttgtgtttatcggagtagctttcttaatgcttcttatgctggttgtcacatggaacgatatccagcggctgtttttgtaaacgaaaagtaaatcaatcagaggtgcgaagaaatgagacaaagcttgacgcttattcctacgctccgtgaagttccagctgatgccgaagcaaaaagtcatcagcttcttctgagagcaggatttatcagacagaatacgagcggggtatacagctatatgcctcttgcgtataaggtgattcaaaacattcagcagattgttcgagaggaaatggagaaaattgatgccgtagaaatgctcatgcccgcattgcagcaggcagagacatggcaggaatcaggcagatggtatacgtatggtcccgaactgatgagactaaaagaccgtcatggccgtgaatttgctttaggggcaacgcatgaagaggttatcacttcgcttgttcgcgatgaggttaaatcttataagcgtctccctctgactctttatcaaattcagtctaagttcagagatgaaaaacgtcctcgcttcggtttgttaagaggccgcgaatttattatgaaggatgcgtactctttccatgcatctgcagagagcctggatgaaacgtatcaaaaaatgtacgaggcctattctaatatttttgcccgctgcggcattaatgtaagacctgttatcgctgattcaggcgcaatgggaggaaaggatacgcacgaatttatggcactttctgcgatcggagaggatacgattgcgtattctgatgaatcacagtacgcggctaatatcgagatggctgaagttcttcaccaggaagttccttcagatgaagagcctaaagctctagagaaggttcatacgcctaacgtgaaaacaatcgaagaactgactgcgttcttacaggtttcggctgaagcgtgcattaagtcagtattgtttaaagctgatgaccgttttgtcttagtgcttgtaagaggggatcatgaagttaacgatattaaagtgaaaaacttgcttcatgcagaagttgtagagcttgctacacatgaagaggtcattcagcagctcggaacagagccaggctttgtaggccctgtcggtattcatcaggatgtggaagtatatgccgatcaagctgtgaaagcaatggttaatgctgttgccggggcaaatgaaggagatcatcattataaaaatgtcaatgtgaatcgtgacgcgcaaattaaagaatttgctgatcttcgttttattaaagaaggtgatccttcaccagacggcaagggaacgatccgttttgctgagggaatcgaagtcggacaagtctttaagctcggaacacgctattcagaagcgatgaatgcgacatatttagatgaaaacggacgcgcgcagccaatgctgatgggctgttacggaatcggtgtgtcaagaacgctttctgctattgctgaacagcatcacgacgaaaaaggcttaatatggccaaaaagcgttgcgccgtacgatcttcatattcttgctttgaacatgaaaaacgatgggcaaagagagcttgctgaaaagctgtatgccgatttaaaagcggaaggctatgaagtgctctatgatgaccgtgctgagcgtgccggcgtaaaattcgctgattcagatttaatcggccttccaatccgcatcactgtcggaaaacgagctgacgaaggaatcgtcgaagtgaaaattcgtcaaactggtgagtcaactgagatttcagtagacgaattatctgcgtttatcagcaagcagtaatcaccataacgatttatcaaaaaacatgttaaaatagaaataatagaaggtacctcattgcctgaggtaccttcacttatgatgtttttagggagggatactgtcttaatggaacagttatcagtaaacagaaggcagtttcaaattcttctgcagcagattaatatgacagatgataccttcatgacatactttgaacatggcgagattaaaaagctgacaattcacaaagcttctaagtcttggcattttcattttcaatttaaatctttgctgccttttcaaatatatgacacattaacaacgaggctgacgcaatcgtttgcccacatagcaaaagtgacatcttcaattgaagttcaggatgccgaggtcagtgaaagtatcgttcaagactactggtcacgctgcattgaagaactgcagggcatttcgccgccgattatcagtcttttaaaccagcaaaaaccgaagctgaagggcaataaactgattgtcaaaaccaaaacggatacagaagcggctgcgctaaaaaacaaatacagttccatgattcaagcaggctaccgtcaatttggctttccggatcttcagcttgatgctgaaatatttgtatccgagcaggaagttcaaaagtttcgggaacaaaagcttgcggaagaccaagagcgggcgatgcaggccttgattgaaatggagaagaaagataaagaaagtgatgaagaccaagcaccatctggtcctcttgttatcggttatcaaattaaagataacgaggaaatccggacacttgacagcatcatggacgaagaacggagaattacggtccaaggttatgtgtttgatgtggagacgcgcgagctgaagagcgggcgcacgctgtgtatcttcaaaattacagactatacaaatagtattttgatcaaaatgtttgcacgtgaaaaagaagatgcggcactgatgaagtctctgaaaaaaggaatgtgggtaaaagcacgcggaagcattcaaaatgatacatttgtcagagaccttgtcatgatcgcaaatgacgtaaacgaaataaaagcaaaaacccgtgaagattcagcacctgaaggagaaaaaagagtggaattgcatcttcattccccaatgagccaaatggatgctgttacgggtatcggaaagcttgtcgaacaggcgaaaaaatgggggcatgaggccatcgctttgactgaccatgctgtcgttcaatcctttcctgatgcgtattctgcggcaaaaaagcatggaattaaaatgatttacgggatggaagcgaatctcgtggatgatggcgtgccaattgcttataatgccgcacatcgtctgctcgaagaagaaacatatgttgtttttgacgttgagacgacaggattgtctgctgtatacgataccattattgagctggctgcagtaaaagtaaaaggcggagaaattattgataaatttgaggcgtttgcgaacccgcatcgtccgctttccgccacaatcatagagctgacagggatcactgatgatatgctacaagacgctccggatgtcgtagatgtaataagagatttcagagaatggattggcgatgatatccttgtcgctcataatgcaagctttgatatgggattcttaaatgtagcctataaaaagcttcttgaagtcgataaagctaaaaacccagtcattgatacgcttgaacttggacgttttctctatccggaatttaagaaccaccggttgaacacactttgtaaaaagtttgatatcgaactcacacagcatcaccgtgcgatctatgatactgaggcaaccgcttatttgcttctgaaaatgctgaaagacgcagctgaaaaaggcattcagtaccatgatgagttgaatgaaaatatgggtcagtccaatgcttatcaaagatcaagaccgtatcatgcaacattacttgccgtgaacagcacgggacttaaaaatttatttaagcttgtgtcactttctcatattcattatttttacagagtgccgcgtattccgagatctcagcttgagaaatacagggaagggctgctgatcggttctgcctgtgacaggggagaggtttttgagggaatgatgcaaaaatcgcctgaagaggtggaagatatcgcgtcattctatgattaccttgaggttcagccgcctgaagtgtatcgtcacttgctggagcttgaactggtccgtgatgaaaaagcgctgaaagaaattattgcgaatatcacgaagctgggggaaaagcttaataaaccggttgttgctacgggaaatgttcattacttgaatgatgaggataaaatctacagaaagattttaatatcctcacaaggcggggcaaatccgctgaataggcatgaactgccgaaagtgcatttcagaacgacagacgaaatgcttgaagctttttctttcttaggtgaagaaaaagcgaaggagatcgtagtcaccaatacccaaaaggttgcttctttagttgatgacatcaagccgattaaagatgatttatatacgccgaaaatcgaaggcgccgatgaagagatcagagaaatgagctatcagcgtgcaagaagcatttacggggaagagctgcctgaaattgtcgaagcgcggattgaaaaagagttaaagagtattattggccacggatttgctgttatttacttgatctctcacaaacttgtaaaacgttcactagatgacgggtatctcgttggttcccgtggttccgtaggatcttcattagttgcgacacttactgagattactgaggtaaacccgctgccgccgcactatgtttgtcctgagtgtcagcattctgagttctttaatgacggttctgtcggttctggttttgacctgcctgacaagacatgtcctcattgcggaacgcctttgaaaaaagacggccatgatattccatttgaaacgttcttaggatttaaaggggacaaagtacctgatatcgatttgaacttctcaggggaatatcagccgcaagcacacaattacacaaaagtattgttcggagaagacaatgtatatcgtgcgggaacaataggcacggtggcagaaaaaacagcctacggttatgtaaaaggctatgccggagacaacaatcttcatatgcgcggtgccgaaatagatcggctcgtacagggatgcacaggtgtaaaacgtacaactggacaacaccctggcggtattatcgtagttccggattatatggatatttatgatttttcaccgatccagttcccggcagatgccacaggttcagagtggaaaacgactcattttgatttccactccatccatgacaacctgttaaaacttgatattctcggacacgatgacccgactgttattcggatgcttcaagacttaagcggaatagatccgaaaacaattccgacggatgatcctgaagtgatgaagatcttccagggaaccgaatcactcggtgtgactgaagaacagattggctgtaaaacgggcactcttggaattcctgaattcggaacccgatttgtccggcagatgcttgaagatacaaagccgaccactttttctgagctcgttcagatttcaggcttgtctcacggaactgatgtatggcttggcaatgcacaggagctcatccacaataatatttgtgagctgagtgaggttatcggctgccgtgatgacattatggtttatttaatctatcaaggccttgaaccgtcccttgcctttaaaatcatggaattcgtgcgtaaaggaaaaggattaacgcctgaatgggaagaagaaatgaaaaataacaatgtcccagactggtatattgattcctgtaaaaagattaaatacatgttcccgaaagcccacgccgcggcatatgtcttaatggcagtccgcattgcttactttaaagtgcatcatgctcttttgtattatgcggcttattttaccgttcgtgcagatgactttgatatcgatacaatgatcaagggctctacagcaatcagagcggtaatggaggatataaactctaaaggacttgatgcttcaccgaaggaaaagaaccttctgactgttttagaattagcgcttgagatgtgtgagagaggctattcattccaaaaagtcgatttatatcgctccagcgccacagagtttattattgacggcaacagtctaattccgccgtttaactctattccagggttagggacgaacgctgctttgaacattgtaaaagctcgcgaagaaggcgaattcctctcaaaagaagatttgcaaaagagagggaaagtatcaaaaacgattttagagtacttagatcgccacggctgtctggaatcactgcctgatcaaaaccaattgtcactgttctaatatggaatgcagaatttctcagaaattctgcttctatgcatacataagcgcaaaaagtgccatcgtaatattagagtttctgtcacttgcttaggtatgaaggtaagcgtatatccatttgcaataaaaatatggttatggtatagttttattggaaatgctaacgattaccgaggcaaagagtggggaaacccgctcttttgtattgaacaggagaattttgtctcgacatgttcatcgtttactttttagcccctgctcttttgaagcagggtttttatgcagagtgacgagacgaatatgagatcgacagcacaaggaggaagaacatgagcaaaaaagtgactgacaccgttcaagaaatggctcagccaatcgtagacagccttcagctggaactcgttgacattgaatttgtcaaagagggccaaagctggttccttcgcgtgtttattgattccgatgacggtgtggatattgaggaatgtgccaaagtaagcgaagctttaagcgaaaagcttgatgaggcagacccaatcagccaaaattactttcttgaagtctcatctccaggagctgagcgtccgctaaagaaaaaagccgatttcgaaaaatcactaggaaaaaacgtatacattaagacgtatgagcctattgacggcgtaaaagtgtttgaaggtgaactggctgaatttgatggacaaacagtgacagttgagatcacgatcaaaacaagaaagaaacggatcaatattccgtatgaaaagatagctaatgcaagattagctgttacattctaatgaatacaaatgttttaaggggggagaccgttaaatgagcagtgaattattagatgctctcacgattcttgaaaaagaaaaaggcatcagtaaagaaattatcatcgaagcaatcgaagctgcgttaatttctgcttataagcggaattttaatcaagcgcaaaatgtacgggtggatctaaaccgtgaaactggctccatccgtgtatttgcaagaaaagatgtcgttgacgaagtatacgaccagagattagagatctcaattgaagaggcacagggcatccatccggaatatatggtcggcgatgtcgtcgaaatcgaagttacacctaaggatttcgggcgcatagctgctcaaacagcgaagcaggtcgtcacacagcgtgtgcgcgaagctgagcgcggcgtgatctattctgaatttatcgaccgtgaagaagacatcatgacagggatcgtccagcgtctggacaataaatttatctacgtgtctttaggcaaaatagaagccttgctgccggttaatgagcaaatgccgaatgaaagctacaagccccatgaccgcattaaggtatatatcacaaaagtagaaaaaacaacgaagggcccgcagatttatgtgtcaagaacacatccaggcctgttaaagcgtttgtttgaaattgaagtgcctgaaatttatgatggaactgtcgagctaaaatctgttgccagagaagccggcgaccgttcaaaaatttctgttcgcacagatgatcctgacgtggatcctgtcggttcatgcgtagggcctaaaggccagcgtgtgcaagcaatcgtcaatgaattaaaaggtgaaaaaattgatattgtcaactggtccagtgatcctgtagaatttgtcgcgaatgcgctcagcccttccaaagtgcttgatgtcatcgttaatgaagaagaaaaagcgacaactgttattgttcctgattaccagctgtctctggcaattggcaaaagaggacaaaacgcacgcttagctgctaaactgacaggctggaagattgatattaagagcgaaacggacgcaagagaacttggaatctatccgagagaacttgaagaagatgatgagccgctctttacggagcctgaaactgctgaatcggatgaataagaggtgactttaggtgaataaacacaaaaagatcccattacgcaaatgtgtagtgactggtgaaatgaagcctaaaaaggaactgatccgagttgtacggtcgaaagaaggcgaaatctcagtagacccgaccggaaaaaagaatgggcggggtgcttatttaacgctggataaagagtgcatcttagcagcaaaaaagaaaaacactttgcaaaatcaatttcaatcacaaatcgatgaccagattttcgatgaattgctggaactggcggaaaaggtgaaaaaataaaatgtctggaatggaatggtttcccttgctgggtctggccaatcgagctcgtaaggtcgtgtcaggcgaagacttggtaataaaagaaatcaggaatgcgcgtgcaaagcttgtcctgcttacagaggatgcatcatctaacacagcaaaaaaagtaactgacaagtgcaattattataaagtcccttataaaaaagtcgagagtcgcgcggttcttggacgctctatcggtaaagaagcccgtgtcgttgtcgccgtcactgaccaaggttttgcgaataagctgatcagcttgctcgattaatatttttgggggtgaacgaatggctaaaatgagagtatacgaatatgcaaaagcgttaaatgtttcaagtaaggaaattttgaccgcactgaagaacatggatttagaagtgaataatcacatggccatgcttgaagaaaaggccattaaaaagctagatgccaaatataaaaaaggcggcgcagctgctaaatctcaaaagccagcagaaacgaacaaaaacaaacagccacaaggggttaatcagcaatcagctggaaatcaaccaaataaaattcgagacggaaagaagaatgacgtgcagaataatcaatttaacaaaaacaagaagaataacaacaacaaaaaaaataaacgcaacaacaacaataataaaaaccaacatcagcaaaagcctgtaaagccgaaaaaagagcttcctgagaaaattacattctctggcactttaacagttggcgcacttgctgaagagcttggcaaagagccttcagaactcattaaaaagctgatgcttcttggcgtaatggctaccattaaccaagagcttgataaagacacaatcgaactcattgcatcagaatatggtgttgaaacagaagaggtcattgtgcttgaagaaacagagctggaaaaatacgaagagcctgataatgaagaggatcttgaaattcgtcctcctgtcgtgacaatcatgggccacgttgaccatgggaaaacaacgcttcttgacagcatccgtaaaacaaaggttgttgaaggagaagcaggcggaatcactcagcatatcggcgcttatcaaattgaagagaacggcaagaaaatcacgttcttggatacaccgggccacgccgcatttacaacaatgcgtgcacgcggtgcagaagtaactgatattacgattcttgtcgtagctgccgatgacggtgtcatgccgcaaacagttgaagcgattaaccatgcaaaagcagcagaggttccaatcatcgtagctgtgaataaaatagataaagaatccgcaaaccctgaccgtgtgatgcaagaactgacggaatacggtcttgtccctgaagcatggggcggagaaaccatttttgtgccgctttccgctttaactggaaaaggcattgatgagctcgttgaaatgattttgcttgtcagtgaggtagaggaactgaaagcgaatccgaaccgtcaggcaaaaggaacggttattgaagctgaactcgataaaggcagagggtcagttgcgacgttgctcgtacagactggaacactgcatgtcggtgatccgatcgtagtcggcaatacatttggccgtgtccgtgcaatggtcaacgacattggccgccgtgtgaaaactgccggcccgtcaactccggttgaaattaccggtttgaatgatgtccctcaagcgggagaccaattccttgtctttaaggatgaaaaaacagctcgttctgtcggtgaagcccgtgcttcaaaacagcttgaagagcagcgcagcgataaagcgaagctcagtcttgatgatttattcgagcaaattaagcaaggtgatgtaaaagacatcaacctcatcgtaaaagctgacgttcaaggatctgctgaagctttaacggctgcgcttcaaaaaattgaagtagaaggcgttaaagtgaaaatcatccatacaggcgttggtgcgattactgaatctgacattatcttggcatctgcttccaatgcaattgttatcgggtttaatgtgagaccggacggaaatgctaagagtacggctgaagctgaaaatgtagatattcgacttcaccgtatcatttacaaagtaatcgacgagattgaagctgccatgaaaggtatgcttgatcctgaatatgaagaaaaagtaattggtcaagtagaagtacgccaaacattcaaagtatctaaaatcggtacaattgccggcggatatgttactgaaggaaccattacgcgcgacagcggcctccgtttaattcgtgacggcgtcgtcatctttgagggcgaagtagatgttctgaaacgctttaaagacgatgtgaaagaagtttcacaaggctatgaatgtggtattacaattaagaaatacaatgacattcgtgaaggtgacatccttgaagcgtttgtcatgcaagaaattgaaagaacgtgatcggatttgcggagtgtgaatgcatcatttatgatgcaggatcgctaaaagaaaagcgtgccgttctgaagcgggttttaactagggttcaaaacaagttcaatgtttcgatttcggagattggctatcaggacacctggcaaagaaccagcttcggaatcgccgctgtttcttcctctcgcgttcaaacagaaaaagaactgcagcgcgtcctagcgtttatcgattcttttcctgaaattgaacggacgatcactaggacagagtggttttaacttagaggtgattgaattgagtatgagagcaaaccgtgtcggcgagcaaatgaaaaaagaactcggtgatattatcagccgcaagctgaaagacccgagaattggttttctgacagtaacggatgtacgtgtatcaggtgatttgcaaattgcaaaggtgtatatctcggttctcggtgacgagaaaaaacgggaggaagcgctgaaagggctggcaaaagcgaaaggatttatccgatccgaaatcggcagccgcatcagacttcgaaaaacgcctgaaattgaatttgagttcgatgaatcaatcgattacggaaatcggatcgaaacactgattcacgaattacattcagagaaaccatctgaataaaaaaagagaggataggcgtatatcgtctgtcctctttcttcgtttataagaaaaaaactcaaaagaaggagtgaaaggcaaatggttaacggagttctccttttacataaacctgttggcatgacatcgcacgactgtgtcatgaagatccgaaagctgttaaaaacaaaaaaagtaggacatacaggaacgctcgatccggaagtatcaggcgtgcttccgatttgtgtaggaagagcgacaaaaatagtcgaatacttaactgaaaaatctaaaacgtatgatgcagaaataacattgggcttttcaaccacaacagaggatcaaaccggagaaacggtggaaacaaagcctgtcaatcacgacattgataaagcggatgtagaaaaggttttaaacagtttaaaggggaaacaagaacaaattccgcccatgtattccgctgtaaaagtaaacggcaaaaaattatacgaatacgcaagagcagggattgaagtagaacgtccgaaacgtatgataaccattgaagacattgccctgacaacagagattaaacatcatggagaaaccgcaagcttccggtttacagtgacttgctccaaagggacctatgtaaggacgctggcggtcatgatcggagaaaagctcggatatccggcccatatgtctcatttaatccgtacggcatccggagatttttctctcgacgaatgctttacttttgatgaactcgaagcacaggcccaatccggaaccgtggaagagcatacagttcctattgaacgtgcgctcaatcatttgccgaaatggatcataagtgatacattagctaagaaagtagaaaatggggctttgcttgagacgcccgagcagttttctgaaatgacaagtgaagaccgtattgccgtctttactgaatccggaacctgcttggcgatctatttccctcatcctgcaaaaaaagggctgttaaagccggcaaaagtattgatgcaaaaaagcgaacaatagaaaaaaggtgaccgttctgtgaagacgatacatattacacatcctcatcatttaataaaagaggagcaggcaaaatcagtgatggcgttaggttattttgacggcgttcatctcgggcatcaaaaggtaatcggcacagcgaagcaaatagccgaagaaaaaggtctgacattagctgtgatgacctttcatccccatccttctcacgtgttgggcagagataaggaaccaaaggatctgattacgcctcttgaagacaaaataaaccaaattgaacaattaggcacagaagttctgtatgtcgttaaatttaatgaagtgtttgcttctctttctcctaagcagtttatagaccagtatattatcggccttaatgtgcagcacgcagtggcaggctttgactttacgtacggcaaatacggcaagggaacaatgaagaccatgccggatgatttagacggaaaagctgggtgcacaatggtagaaaaattaacggagcaggataaaaaaatcagttcttcgtatatccgtaccgcgcttcaaaacggagatattgaattggcgaatgtcttgcttggacaaccttattttattaaaggaattgtcattcatggtgataaaagagggcggaccatcgggtttccgacagcgaatgtcggtttaaataacagctatatcgttccgcccacaggtgtatatgccgtaaaagcggaagtgaacggcgaagtttacaatggcgtttgcaatattggctataagccaacgttttatgaaaagcgccctgaacagccttccatcgaggtcaatctgtttgatttcgatcaagaggtatatggagccgctataaaaatcgaatggtacaaacggattcggagcgagcggaaattcaatggcatcaaagaattaacagagcaaattgagaaagataagcaggaagccatccgttatttcagcaatttgcggaaataacttgcaacgcacgcaaattttattctaaaatatttgcatataggcacgatttttagtatgatagttttcgtagtcttaaaaccattgcttggcaatccgaagtcaccgacggttgctaggtaactggggctaaatatgatttggaggtgaaacaggatggcaattactcaagagcgtaaaaaccaactcatcaatgagttcaaaacacacgaatctgatactggatctccagaagttcagatcgctatcctaactgactcaattaacaacttgaacgagcatttacgtactcacaagaaagaccaccactcacgtcgcggtcttcttaaaatggtaggtaagcgtcgtaatcttcttacgtatctgcgtaataaagacgtaactcgttaccgtgagttaattaacaaactaggcttacgtcgataatcgtaaaaagcgggaggattcccgcttttttatcgtattaaagcgaaatttcttataacaaatcattgaaatccttttacatactactttgacattgatatgttcaattcatttcgttcataataggagtaattgattatttcacacaacgaagagaggagttcgtaattgtatgggacaagaaaaacatgtctttaccatagattgggccggaagaacgcttaccgttgaaaccggccagcttgccaaacaggcaaatggtgctgtgatgatccgctacggtgatacagcagtacttagtacagcaaccgcttcaaaagaacctaaaccgcttgatttcttccctcttactgtaaactatgaagaaagattatatgcggtagggaaaattccgggcggatttattaaaagagaaggacgtccaagtgaaaaagcggttcttgccagccgtttaattgaccgtccgatccgtcctttgtttgccgatggattccgtaatgaagttcaagtcatcagcattgtcatgagtgttgaccaaaactgctcttcagaaatggctgccatgttcggttcatctcttgcactttctgtatcggatattccgtttgaaggaccgattgcaggggttactgtcggacgcattgatgatcaatttatcattaacccgacagtcgatcagcttgaaaaaagcgatatcaatcttgtcgttgccggcacgaaagatgcgattaacatggtagaagcgggagcggacgaagttcctgaggaaatcatgcttgaggccattatgttcggccatgaagagattaaacgcctgattgcattccaagaagaaattgttgcagcagtcggcaaagagaaatctgaaattaagctctttgaaattgatgaagagcttaatgaaaaagtaaaagctttggcagaagaggatctgctgaaagccatccaagttcatgaaaagcatgcccgtgaagatgccattaacgaagtgaagaacgcagttgtggcaaaattcgaggatgaagaacatgatgaagacacaatcaagcaagtgaagcagattttatccaagcttgtgaaaaatgaagttcgccgcctgattactgaagagaaagtaagaccggacggccgcggtgtcgatcaaatccgtccgctctcttcagaggttggcctcttgccaagaacgcacggttcaggtctatttacaaggggacaaactcaggccctcagcgtatgtacgctaggtgctctgggagatgtgcaaatccttgacggcttaggtgtcgaagagtcgaaacggtttatgcatcattacaacttcccgcaattcagcgttggggaaacaggaccgatgcgcggaccgggacgtcgtgaaatcggacacggagcactgggtgagcgtgcgcttgagccagttattccgtctgaaaaagacttcccttatactgtccgtcttgtttcagaagtgcttgaatcaaacggttctacatctcaagcaagcatttgcgcaagcacacttgcaatgatggatgccggtgtaccgattaaagcgccagttgctggtattgcgatgggtcttgtcaaatcaggcgaacattacactgtcttgactgacatccaaggcatggaagacgcgctcggagatatggactttaaagtagcgggaactgaaaaaggcgtaacggccctgcaaatggacattaaaattgaaggcctttccagagagattcttgaagaagcgcttcagcaggcgaaaaagggcagaatggaaatcctcaacagcatgcttgcaacattaagcgaatcaagaaaagagctttctcgatatgcgcctaagatcttaacaatgaccattaatcctgataaaatccgcgatgtcatcggaccaagcgggaaacaaatcaataagatcatcgaagaaaccggtgttaaaattgatattgagcaggacggcacaatctttatttcctctacagatgaaagcggcaaccaaaaagcgaaaaaaatcatcgaagaccttgtgagagaggttgaagtcggccaactttacctaggtaaagtgaaacggattgaaaaattcggggctttcgttgaaattttcagcggaaaagacggtttggtgcacatttcagagcttgcgcttgaacgcgtagggaaagttgaagatgttgtgaaaatcggagacgagattcttgtcaaagtcactgaaattgataaacaaggacgagtgaatttatcccgcaaagcggtgctccgtgaagagaaagaaaaagaagaacaacaatcttaaatgaaaacataaaaggagcctgggagacccggcttctttattttgaagcttttcaaaagcaggcgggttctaccttgtccctctccttcataatgtgagatgaggggggacagaacatgtacaaaaaatttgtaccgtttgccgtttttttatttcttttttttgtctcatttgagatgatggaaaatccgcatgcacttgattatataggggcaatgaaaaaagatacggtgactgtcacggcgtcaaaagacccgttatatgaagaattgcttcaaaaagcgccggagtacgaagttaagccccagaatgcaagaattgataaagtgtggaaaagcattccaggctacaatggattaaaggtcaatattgaacaatcatataaaaaaatgaaacagcatggtgagtttcgggaaaaagatttggtgtacagtcaagtaaaaccaagtgttcatcttgagtcacttcagcctgagcctatttataaaggaaatcctgacaaaccgatggtggcttttttaatcaatgtggcatggggaaatgagtatttggaaaaaatgcttcctattctgcaaaagcaccaggttaaagctacgttctttttagaaggcaattgggtgagaaacaatgtacagctcgctaagaagattgcaaaagacggacatgaaatcggaaatcattcatacaatcatccggatatgagcaaactgactacaggaagaatttccgagcagctcgacaagactaatgaacaaatagaacaaacgatcggcgttaagccaaagtggttcgctccgccaagcggaagtttcagaaaagcggttatcgacattgcagcagagaaacagatgggaacagtcatgtggacagttgatacaatcgattggcaaaagccggctccgtctgtacttcagacgagagtgttaagcaagatacataatggtgccatgattttaatgcatccgactgaccctacggcggaaagtcttgaagcgctgattacacagataaaagacaaaggatatgcgcttggaacagtcactgaactaatggatgaaacaagactattgaagtaacagatgaaggcagcttgtctttgaataggaggaacaaatttgattaaacgatatacgtgtcaaaatggtgtaagaattgtgctggaaaataacccgacagtccgttctgttgcgatcggcgtatggatcggcacaggttcgagacatgaaacgccggagataaacggaatttctcactttttagagcacatgttctttaaagggacgagcacaaaatctgcacgcgagatagcagaatcttttgatcgtattggcggccaggtcaatgcgtttacttcaaaggaatatacctgctactatgcaaaggtgcttgacgagcatgcgaattacgcgctggacgtattagcagatatgttctttcattcaacgtttgatgaaaacgagctgcaaaaagagaaaaatgtagtatatgaagaaattaaaatgtatgaagatgcgccggacgacattgtacatgatttactgagcaaagccacttacggcaatcattctttaggctacccaattctaggcacggaagaaacgcttgcttcctttaacggtgactctctcagacaatacatgcatgattattatacgccggaccgagtggtgatttcggtagcgggcaatatatctgacagttttatcaaagatgtagaaaaatggttcgggtcatacgaggcgaagggcaaagcgacaggccttgagaagcctgagttccacacggaaaaactgacgagaaaaaaagaaacagagcaggctcatttgtgccttggatttaaaggcttagaggttggccatgaacgtatttatgatttaatcgtcctcaacaatgtgctcggaggcagcatgagcagccggctgttccaagatgtgcgtgaagataaaggacttgcttattctgtttacagctatcacagctcatatgaagacagcggaatgctaacgatttacggcggaacgggtgcaaatcagcttcagcagctgtcggaaacaattcaagaaacccttgccacattaaaacgtgacggcattacctcgaaagaactggaaaacagcaaagagcaaatgaagggaagcttaatgctgagcttagaaagcacaaacagcaaaatgagccgaaacggaaaaaatgaactgctgctcggcaaacataaaacattagatgaaatcatcaatgaattaaacgccgtgaacttagagcgtgttaacggccttgccagacaattgtttactgaagactatgcattagcacttatcagcccttccggcaatatgccgtcttaaaaaggaaagcctgctccataatggagcaggcattttttaatccctttcatcatacatagtacaagggggtgacagacatgcggctcagtgaattatcaggaaaggaaattgtagacatcaaaagagctgaacggctcggagtgctcggccagaccgatttggaaatcaatgaacaggatggacagattacagcactcctcattcccacagttaagtggtttggtttgagaaagcaaggtcatgacattcgtgtcccatggcaccatattcaaaagatcggttcagatatgattatattagatgtacctgaggaaatgcctcctcgacaagagtaaatagcccaattgactgtgaagcgggctctaaagaaaacatctgaaacatcggctgccggagccgatgtttttttatatggaaaaagcgcatcttttatattcaccggtatttccttttgatcataagatgaaggggagcttaacaactagagatccagtatatacaaagaaggtgaacgtttagaatgttaaccggattgaaaattgcagttatcggcggtgacgcaagacagctcgaaattataagaaagctcactgaacagcaggctgacatctatcttgtcggttttgaccaattggatcacggttttaccggggcagtaaaatgcaatattgatgaaattccttttcagcaaatagacagcatcattcttccagtatccgcgacaacaggagaaggtgtcgtatcgactgtattttcgaatgaagaagttgtgttaaaacaggaccatcttgacagaacgcctgcacattgtgtcattttctcaggaatttctaacgcctatttagaaaacattgcagctcaggcaaaaagaaaacttgttaagctgtttgagcgggatgacattgcgatatacaactctattccgacagtagaaggaacgatcatgctggctattcagcacacggattatacgatacacggatcacaggtggccgttctcggtctggggcgcaccgggatgacgattgcccgtacatttgccgcgctcggggcgaatgtaaaagtgggggcaagaagttcagcgcatctggcacgtatcactgaaatggggctcgttccttttcataccgatgagctgaaagagcatgtaaaagatatagatatttgcattaataccataccgagtatgattttaaatcaaacggtactttctagcatgacaccaaaaaccttaatattggatctggcctcacgtcccgggggaacggattttaaatatgccgagaaacaagggattaaagcacttcttgctcccgggcttccagggattgtcgctcctaaaacagctgggcaaatccttgcaaacgtcttgagcaagcttttggctgaaatacaagctgaggaggggaaataaggatgtcgtcattaaaaggaaaaagaatcgggtttgggctgaccgggtcgcattgcacatatgaagcggttttcccgcaaattgaggagttggtcaacgaaggagctgaagtccgtccggttgtcacatttaatgtaaaatctacaaatacccgatttggagagggcgcagaatgggttaaaaaaattgaagacctgactggatatgaggccattgattcgattgtaaaggcagaacctcttgggccgaagctgccccttgactgcatggtcattgcgcctttaacaggcaattcaatgagcaagctggcaaatgccatgacggacagcccggtgctgatggcggcaaaagcgacaatccggaacaatcggcctgtcgttctgggtatctcgacaaatgatgctcttggtttaaacggaacaaatttaatgaggctcatgtcaacaaaaaatatcttttttattccattcgggcaagatgatccatttaaaaaaccgaattcaatggtagccaaaatggatctgcttccgcaaacgattgaaaaggcactcatgcaccagcagcttcagccgattctagttgagaattatcagggaaatgactaaatttacagaaaatctttcccaaactaaaaaattcggtcatagcccgcatattctatggtaaaataaaacgtaaaatcatagtcaaatcaattcaatgaagctgattggcggaaggagttttacagatgggaagaggtttacacgtagctgttgtcggagcgacaggggctgtgggacaacaaatgcttaaaacacttgaagacagaaactttgaaatggacacacttacattgctatcttcaaaacgctctgcggggacaaaagtcacgtttaaaggccaagagctgactgttcaggaagcttctcctgagagctttgaaggggtaaatattgctttgttcagcgccggcggaagcgtatcacaagcattggcaccagaagctgtaaaacgcggcgctattgttatagataatacgagtgcgttccgcatggatgaaaatacaccgcttgttgtgccagaagtgaatgaggcagacttgcatgaacacaacggcattattgccaatccaaactgctctacaatccaaatggttgcggcacttgaaccgatccgcaaagcatatggcttaaacaaggtcatcgtatcaacttaccaggcagtatcaggagcgggtaatgaagctgtaaaagagctttacagccaaacacaggcgattttaaataaagaagaaatagagcctgagatcatgcctgtaaaaggtgacaaaaaacactatcaaatcgccttcaacgcgattccgcaaatcgataaattccaagataacggctatacgtttgaggaaatgaaaatgataaatgaaacgaaaaaaatcatgcacatgcctgaccttcaagtagcggctacatgtgtgagactgccaatccaaactgggcactcagagtccgtctacatcgaaatagaccgtgatgacgctacagttgaagatattaaaaatctattgaaagaagctccgggcgtgacacttcaggatgatccaagccagcagctttatccgatgcctgctgatgctgtcggcaaaaacgatgtgtttgtgggccgcatccgtaaagacttggacagagcaaacggttttcatttatgggttgtttctgataacctattaaaaggcgcggcatggaactctgttcaaattgcagaaagcctgaaaaaactaaacctcgtataaaagagagaattttctaaagacgaatagaagagagtaaggcgctatcagcctgctctcttctgttacgtccgaataatttggagtgaaaacagtgaagataattgttcaaaagttcggcggaacatcagtaaaagatgataaaggccgcaaactggctttagggcatattaaagaagcaatcagtgaaggatataaggttgtcgttgtcgtttcagcgatgggccgaaaaggagacccgtatgcaacagattctttacttgggctgctttacggcgatcagtcagcgatttctcctagggaacaggatttgcttttatcttgcggagagactatttcctctgtcgtctttacaagcatgctgcttgataacggtgtgaaagcagctgcgctgacaggggctcaggctggctttttaacgaatgatcagcataccaatgcgaaaatcattgaaatgaaaccggagcgtttattcagtgtgctcgccaatcatgatgcggtagtcgtcgcaggcttccagggcgcaactgaaaagggtgatacaactacaatcggcagagggggcagcgatacgtctgcagccgcactcggagcagctgttgatgcggaatacatcgatattttcaccgatgtagaaggcgtgatgactgctgacccaagagtggtggaaaatgcaaaaccgcttcctgttgtgacgtatacggaaatctgcaacctggcgtatcagggggccaaggtcattcatccgcgtgctgtggaaatcgcaatgcaggccaaggttccgatccgcgtccgttcgacttattcgaatgataaaggtacattggtgacatcacatcactcttccaaggtcggcagtgatgtttttgaaaggctgattacgggaatcgcccatgtcaaagatgtcacgcagttcaaagtgcctgcgaaaatcggccagtataacgttcagactgaagtgttcaaggctatggcaaacgctggaatcagtgtcgatttctttaacattacacctagtgaaatcgtctatacggtagccggaaataaaacagaaacagctcagcgtattttaatggatatgggctatgatccaatggtgacgagaaactgcgcgaaggtatcggcggtcggcgcgggcattatgggtgttcccggtgttacgtccaaaattgtatcggctctttcagaaaaagaaattccgatccttcagtcggctgacagccatacgacgatatgggtgctcgtccatgaagcggatatggttcctgctgtaaacgctttgcatgaagtgtttgaactttcgaagtaaatgtgattgaatcatgatgaggtgaataaaatgaatttcggaaatgtgtctacagcgatgattacaccctttgacaataaagggaacgtagactttcaaaaactgtctacactgattgattacttgttgaaaaacggaacggattctttagtagtagcgggaacaactggagaatctccgaccctttcaactgaagaaaaaattgcgctttttgaatatacagtaaaagaagtaaacggacgggtgcccgttatcgctggtactggaagcaacaacacgaaagattccattaagctgacaaaaaaagctgaggaagcgggcgtggacgctgttatgcttgttaccccgtattacaataaaccttctcaagaaggaatgtaccagcattttaaagcaattgcggcagagacatctcttccggttatgctctataatgttcctggccgtacggttgcttctcttgctcctgaaacgacgatccgtttggcggcagacattccgaatgtggttgcgattaaagaagcgagcggagacctcgaagcgattacaaaaattattgctgaaacacctgaagacttctatgtctattcaggggatgacgctctgacgcttccaattctttcagttggaggaagaggagttgtgtcagtggcgagccatattgcaggcactgatatgcagcaaatgatcaaaaattatacgaatgggcaaacagctaatgcggcactgattcatcagaaactgctgccgattatgaaggaactgtttaaagcgcctaatcctgctccagtcaaaacagcgcttcagctgagaggtcttgatgtcggttctgtgcgtctgcctctagtcccgttaactgaggatgaacgtctgagcttaagcagcacgatcagcgaactgtaagaaaatttcatacagtgaaacaaacgcggtcattctcacattcagctgagtttgaccgtttcttttacatattggttttccctaaaccttctgctttatcttgttttctaaatttactttcagttataataggaacaagtgatgatggacgggtatgagactaggaggatatagattttgaaaaagaaaaatacagaaaacgttagaattatcgcccttggcggtgtcggagagattgggaagaacctttatgtcattgaaattgactcagacatatttgtcgttgatgccggccttatgcatccagaaaacgaaatgctcggtattgatgtagtgattcctgacatatcatatttgattgaacgggctgaccgcgtcaaggcaatctttttaacgcacgggcacgatgaaaatatcggcggcgttttttacttattaaacaagctgtccgttccagtgtacggaacaaaattgacgcttgcactgttaagagagaaattaaaacaatacggacataaccgaaaaactgatttaagagaaattcactccaaatctgtcattacatttgaatcaacaaaggtatcgttctttagaacgattcacagcattcctgattctgtaggtgtgagctttaaaacatcacttggatctattgtatgcacgggagacttcaaatttgaccaaacacctgcacttaatcagacgtgcgacattggcgagatcgccaagatcggcaatagcggcgtgctcgctctgctttctgacagtgcaaatgcggaacggccgggttacaccccttcggaagcggctgtcagcggagaaatttcggatgcgctgtataattcacagaaccgggtgattattgctgttttcgcatccaatattaaccggattcagcaagtcattcatgcagcggctcaaaatggcagaaagattgccgtagccggaaaaaatcttcaatctgtcctgcagctggcgagaaagttaggatacattgaagcagatgatgaattgtttatttctgtacaggatgtcaaaaaatatccgaagcgcgaagtggccattattacagccggaagccaaggtgaaccattagctgctttgacaagaatggcaaacaaagctcacaaacagctgaacattgaagaaggggatacggtggtcattgcgtcaactccgattcccgggcaggaactcatttactctaaaacagtagatcttcttgcgagagccggtgcacaagtcatctttgcccaaaagcgtgttcatgtatcaggccacggctcacaagaagagttaaagctaatgatcaacctgcttaaaccaaaatatttgattcctgtaaacggcgaatacagaatgcaaaaagctcattcaaaaatcgctgaagaaaccggcatgaagcgcagcgacatcttcttaattgaaaaaggcgacgtcgttgaattccgcggccaaaacgtaaaaattggggataaagttccttacggcaatattttaattgatggtttaggtgtcggtgatatcggcaatatcgtattgagagaccgccgcttgctttcacaggacggaattttaatcgttgtcattacacttgataaacaaaagaaaaatcttgtatcaggaccagaaattatcactcgcggctttgtttatgtaagagagtctgaaggtctaatcgtacaggctactgagctcgtccggtccatcgtgacagaagcgactgaaacatcaaatgtcgaatggtcaacgctgaagcaggcaatgcgggatgctttgaaccaattcctttatgaaaaaacgaaacgtaaaccgatgatcatcccaattattatggaagtataatgactgactaaagaccggagttgctccggtctttattttttgtccttcaagccgggattgaatgaagtatctttgttcataatacaaagagaaactcggaaaggatgaaagcgagatggatcatcgtatggaaaacacagaagaagagcgtcctgaaaaaaatgatgcgaaggacagcattatgaataaaatacagcagcttggtgaaacgacgcttccgcagctgccccaagatacaaatattcattgtctgaccattatcggacaaattgaaggccatgttcagcttcctccgcaaaacaaaacaacaaaatatgaacatgtcatcccgcagattgtggcaattgaacaaaatcccaaaattgaaggcttgctgatcatattaaatactgtcggaggagatgttgaagctggtcttgccatagcggaaatgcttgcatctttatcgaaaccgaccgtttctatcgtgcttggcggggggcattccatcggcgttccgattgctgtatcctgtgattacagctatatcgccgaaacagcaacgatgacgattcatccagttaggctcaccgggctggtcatcggggtgccgcaaacgtttgaatacctggataagatgcaagaaagagttgttaaatttgtgacaagccattccaatataaccgaagagaaatttaaagagctaatgttttcaaaaggaaacttaacacgcgatatcggaacaaatgtagtcggtaaggatgcagttaaatacggattgatcgatcacgcaggcggtgtcggacaggcaatcaataaactgaatgagctcatcgacgaagcaaggaaagaagaaggacggatgattcaatgattctttataccgtgatgccgcaggaaattgtgtttgcagaacagaaccaagagacaagcgcacatgagcaaattgaatataaaggtgtaccgcttctagtcgaaatgaaagggaatgaagcggaagtcattcaaatcatgagcaccaatccaatgcattttctgcatccggacatttcacccggacaaaagctgaaattaaacgtataagaatccaacccttttttaagggcaaaatatgctataataggggaatcctacagaaaaaacgcagcctgtaaacggctgctttcttcattatgtatgaacttacattttttaacgcagtaaggtgatgagtgtggcaaagaaaaaacgaaaatcaagaaaaaaacaggcgaaacagctaaatataaaatacgagctcaacggattgctgtgtatagccatttcaattatcgcaatcttgcagctgggggtagtcgggcaaacgtttatctatttgttccgcttttttgctggagagtggtttattttatgcttgttaggtttattggtgttaggagtctcactgttttggaagaaaaaaaccccaagccttttaacgagacgaaaggccgggttgtactgtatcatcgcaagcatattgctgctttctcacgtgcagctatttaaaaatttgacgcacaaagggtctattgagtctgcaagcgtggtgcgcaatacgtgggaattgtttttaatggacatgaatggcagctctgcttcacctgatttaggcggagggatgatcggtgcgctgctgtttgcggcttcacactttttgtttgcgtcgactggttctcagatcatggcaattgtcatgattttgatcggaatgattttagtaacaggacgctcgctgcaagaaacgctaaaaaagtggatgagcccgattggacgttttataaaagaacaatggttagcatttattgatgatatgaaatccttcaaatcaaatatgcagtcatcgaaaaaaacgaaagcgccgagcaaaaaacaaaaaccggcccgcaaaaaacagcaaatggaaccggagcctcctgatgaagagggggattatgaaacagtatcgcctcttattcattcagagccgattatctcaagcttttctgatcgtaatgaagaggaagagtctccagttatagaaaagcgccccgtacctgtgtcgaagccgcttcaggacatccaaccggagacaggtgatcaggaaactgtttctgctcctcctatgacctttacagagcttgaaaataaggattacgagatgccgtcactggatttgctggcagatccgaagcataccggccagcaggctgataaaaagaatatttatgaaaatgccagaaagcttgaacgcacattccaaagctttggcgtaaaggcgaaagtcacacaggttcatctcggaccggctgtaacaaaatatgaagtatatcctgatgtcggagtgaaggttagcaaaattgtcaatttaagcgatgatttagcgcttgcgcttgctgcgaaggatatcaggatcgaagcgcctataccaggcaaatcagcaatcggaattgaagttccaaacgcagaagtggcaatggtttcgctgaaagaagtgctggagtctaaattgaatgacagaccggatgcgaagctgttaattggactcggccgcaatatttcaggtgaagctgtattggctgagttaaacaagatgccccaccttttggtcgcaggcgcaaccggtagcgggaaaagtgtctgtgtcaacggcattattacaagtattttaatgcgggcgaaaccgcatgaagtgaaaatgatgatgatcgatcctaaaatggtagagctaaatgtctacaacgggattccgcatttgcttgctcctgttgtaaccgatccgaaaaaagcgtcgcaggctttgaaaaaggttgtcaatgaaatggagcggcggtacgaattattttctcatacgggtacaagaaatattgaaggatacaatgattatataaaacgcgccaacaatgaagaaggagcgaaacagccagagctgccttatattgttgtcattgtggacgagctagccgatctcatgatggtcgcttcatctgatgtggaagattcgattacgagattgtcccaaatggcgcgggctgccggcatccatcttattattgcgacacagcggccatcggtggatgttatcacaggggtgatcaaagcgaacattccgtcacgaatcgcgttcagcgtatcttcacagacggattcaaggaccattcttgacatgggtggcgctgagaagcttcttggccgcggcgatatgctgtttttacctgtaggggctaacaaacctgtccgtgtgcagggagcatttttgtcggatgacgaagtggagaaggtcgtcgaccatgtgattacgcagcagaaagcgcaatatcaagaagaaatgattcctgaggagacaacagaaactcattccgaggttactgatgaactttatgatgaagctgttgaattaatcgtcggcatgcagacggcatctgtttcaatgctgcaaagaagattcagaatcggctatacgagagcggcgcgcctgattgacgcaatggaggaacgcggtgttgtcggaccgtatgaaggcagcaaacctagggaagtattattatcaaaagagaaatatgatgagctctcttcttaatgaagggagttccgctctctatagttgtcaataataacattatgtaaactgatcacctttctatttattttttcgacaaaacatgatatagttgtcccaattgttcaataatttttatcgaaagtggtttacggaggggaaacatgtctacaaaagctgataatcggcacttgtatttgaaagtaattgaacgaattaaagaggatataaaaaatgggatctacactgagaaggaaaagctgccttctgaatttgagctttccaaaaagcttggtgtcagcagagcgacgctaagagaagccttgcggatactggaagaagagcatgtgattatcagaaggcatggtgtaggcacttttgtccattctaagccgttatttctttcgggcattgaacagctgaacagtgtaaccaagatgatagaacaggcgaatatgacccctggcacgatttttctatcatcacaagtgcttatgccgtctgaagatgatacgaagagatttcatttggcagaagggcaagaacttttttaccttgaacgagtcaggacagctgacggacagccgattgtgtattgtatagacaaaattccgatgaatattttgccgaattctttttctcatcagcaagaatctatgtttgaccttcttgagaaaaattcaggctccgtaatcagctatgcagtaactgatatagaaccgatcggctatcacgataccatttctccagtgcttgaatgcgatcctgaaacagcccttttgctgttaaaacaaacccattacgatcagcacgataaaccggtgctttattctttaaattattttagagcggataaattcagatttcatgttttgcgtaaacgattctaaaaacggacgcctgtatgtgtctgtttttttatttgcactgattcatgtttctttgtacatactttcattccggttaacgcaatatataagggatgacaagaaagtgaatgggtgaaaatgttgagagagaaaaatggaatgaaaaatattattgcattgtcttctgtcccgcttgtgatgacactcgggaactccatgctgattcctgttcttccgatgatggagaaaaagctgtctgtgacttcatttcaagtatctttaatcattactgtatattcagtagtagcaattatttgcattccgattgccggatatttgtcggatcgtttcgggagaaaaaaaatattgcttccatgcctcctcattgcaggattggggggagccgtagctgcttttgcctcgacctatatgaaaaatccttatgctatgatcttggcggggcgggttcttcaaggcattggttctgcaggtgccgctccgattgtcatgccgtttatcggcgacctgtttaaaggagacgatgaaaaggtcagcgcgggtcttggcgatattgaaaccgccaacacgtcagggaaggtactgagtcccatacttggagccttactggcttcttggtattggtttgtaccgttttggtttattccgtttttctgtttgatcagctttttgctcgtattgtttttggtggccaagcctgaagaagatgaagatgcgcctgctgtttctgagtttattaagagtgtgaagaaaatttttaaacaggatggtcgctggctttatacggtcttcattatcgggtgtgtcattatgtttttgttatttggcgtattattttatttatcagatacgctggagaacaagtatgctattgacggagtagctaaaggcggattactggcaatcccacttttgtttttgtcaaccagttcttttatagctggcaaaaagatcggtaaagataaaggccgaatgaaattttgcgttgttacaggaatgattctgttaaccctttcgtttattgccttgtggtggaaccacagtttttattttttatttgtctttttaagctttggcgggattgggattggaatggctcttcctgctttagatgcattgataaccgaagggattgaaagtgaacaatgcggaaccatttcctccttctacaatagcatgcgctttataggagtagctctcggtccacctgtttttgctgcattaatgtctaatgcaaactggattattttcatactctcggcgttttgcagcatcgtttctttatttttagtgctctttactgtagatgctaaaaaaagtgaagaagaagaaaaaaacttagggacggtctagccagccgtctttttttgcgcttccttgcacagtttacaactgtacctatacagcatgcggaggttattgtttccttataaatcctacagttgctataattacatgaaagagtgtttctgcgaatgctgaaaattggtcataatacatactaattaagaaatgaacgaaggaggttccatatgtcatatgttaatgaactcaaatcaaagcacggcggtttaaccgcacacattgtaaaaacagaaaaattcaaaaccgtctcgcttatttttaagatgcttgcgccgctgacaaaggatcaagtcaccaaaagagcgctgcttccgcatgtgcttcttcgcggaacgaaaagccatccgaaaaccgcagaattgcgttcatacctggatgagctgtacggcacgtcagtatcggctgaccttacgaaaaaaggagagcggcacgtcattacgttcaggcttgaaatcccgaatgaaaaatatttaaaagaccaaacgccgctacttgagaaagggctccagcttcttgcagaaatcgtcttttcacctgctttagagggagacgcttttcagtcacaatatgtggctcaagaaaaacggacgcttaagcaaagaatccaagccgtctatgatgataaaatgcgctattcgaatttaaggctgatacaggaaatgtgcaaaaatgagccttacgcgcttcatgtcaatggtgaaatcgacgatgttgatgacattacggcagagcaattatacgaaacataccaaagcgctatccaaaaagaccagcttgatctatatgttgttggcgatgtggacagtaaccaggtacaatcggcaattgataagtatttcaaaacagaagagcgcactcttggcacgattgaaaacaatcacgctgatgaaaaagttcagccaaaagaagtaattgatgaagaggatgtcaagcaaggaaaactgaatatcggctaccgcaccagcatcacttatacagatcaggattatcctgctttacaagtgtttaacggattgttcggcggattctctcattctaaacttttcattaatgttcgggaaaaagccagtcttgcttactacgcggcttcccgtatagaaagttttaaaggcttgttaatggtgatgtcaggcattgaagtgaaaaattttgaacaggcggtttcgattattgctgagcaattccaggcaatgaaaaatggcgatttcagtgagcaggatatagcacagacaaaggccgtcattcgaaatcaagtgctggaaacgattgatacagcatacggtttatctgaatttttatatcagcaggctgctgctcaagtcgagattcctatcgaagactttcttgccaatattgagaatgtcacaaaagaggatatcattaaagccggcgaaaagattcagcttgatacgacttatttcttaaaagggacggagggtgcatcttgatcaaaccaatcgaatatgaacagcttcaggagacgctgtatcatgaaaaaatgtccaacggccttgatgtttacgttttgccgaaaaaaggcttcaacaagacatatgcggtctttacaacaaagtacggctcgatagataaccggtttgtccctttaggtaaaaacgagatggttcacgtgccggacgggattgctcactttcttgagcacaagctgtttgagaaagcggacggagacgtttttcaagatttcagtaaacagggggcttctgccaatgcgtttacgtcatttacaagaacggcttaccttttctcaagcacatcaaatgttgaacgcaatttagagacgcttatcgattttgtacaggacccatattttactgaaaaaacggttgaaaaggaaaaagggattatcgggcaggagattaatatgtacgacgataaccctgattggaggctttacttcggggtcattgaaaacatgtacaaagagcatcctgtcagaattgacatagcgggaacagtggaaagcatttcacatattacaaaagaccttctttatgaatgctatgaaacgttttatcacccgagtaacatgctccttttcattgtcggccctgtagatcctgaagcgattatttctcaggtaagagaaaaccaggggaaaaagccgtatactgatcagccggagatcaaacggaaagaagtgaaagagcaagaagcggttttccgaaaagaaaaagagatcaaaatgaacgtgcagggaccgaaatgccttgttgggctgaaatccaaaaatccgtttaaattaggcaaagagctcttaaagcatgaactttcaatgaacttattgcttgaagctctttttggcaaaagctctgcccagtatgaatcactttatgaaaaaggatatattgacgaaacgtttagctttgattttactgctgaatatgggttcggttttgcggcgatcggcggagatacgcctgagcctgatcaattagctgaagacatttcaagcatgcttttgcgcgccggtgaactgattactgctgaaaagattgaacttgccagaaagaaaaagatcggcacattcttaaaagcgctgaattcccctgaatacatcgccaatcaatttacccgttatgcgttcttggatatgagcctgtttgacgttgtaacggtactcgagcagattaccctcgaggatgtccagaacgtaatacaagaggaaatcgctgcagacaggctgactgtctgcaaggttgttcctaaatcataaacaaaacatccctccagtgtgaggggtgtttttctgcggaaagaaggaaagagaatgaacaaaacagcactaatcaccggagcaagcggcggcattggcaaaagcatcagcgaaacccttgcggctaaggggtacaatctgctgctgcattacaatacaaatcaaaatgcggcagcggagcttgctgaaaaactaagtcagatgtttggcgtaaatacggagatattacaagctgatctgtccgcgcaagatggagcagataagctgacaagttcaattgttcagccggttgatgcgattgttttaaacagcggacgaagccattttgggctgattacggatgtagataacgcaacggttcaggaaatggttcagcttcatgtagcgagtccgtatatgctgacgagaaaccttctgccaggcatgattcggaataaatcgggagcgattgtggctgtcagctcgatttggggagagactggggcatcctgtgaagtgctgtacagcatggcaaaaggagctcagcattcgtttgtaaaaggattggctaaggagctggcgccaagcggaatcagggtaaacgcagtagcgccgggcgcagttgatacaaatatgatgaatcaatttaccccggctgaaaaagaagagatcgctgatgagattccgatcggccggctggcccggccgcaagaaattgcggatgcaacagcttttctcctgtctgaaaaagcgtcatatatcaccggccaaattctgtcggtgaatggcggctggcactgctgatccgaaaatattcggtgtatagtttcttttgcgaaggacacaataatcttgtaacttcacatgaaatggaggaaacaagcatgtcagtattagaaaactgggatagctggaaaaacttccttggcgaccgtctaaactatgcgcaagataaaggtatgagccaggatacgattacagatcttgcgacagaaatcggcagctacttggctaatgaagtggaatctaagaacgagcaggaaaaagtgctggcagatctttggagtgtagcatcaaaagatgaacagcacgccattgccaatatgatggttaagcttgttgaaaataacagcactcactaggaagagaggggatttttcctctcttttttatgttttcctcatcacagcaacattcttctttctaattagagaaaaatgctttatgataaaggaaggtaaaattttgccacaatgaagggggtatatcatttggcaaagctcgaatggtattttgaatatgaaattcaagtgaaccgccccggactgctcggggatatttcatctcttcttgggatgctttctatcaacatcgtaacgataaacggcgtcgatctttccagaaggggaatgctcctcaggtgccgccatatagatcaaattaaacgattagaatcaatcttaaaaacgatggaaacaattaaagtaacgaagcttagagaaccgaggcttcgcgaccgtcttgccgtacgccacggccgttatattcaacgggatgccgatgacaagaaaacgttccgctttgaacgggacgagcttggcttattagtcgattttatggccgaattgttcaaaaaagaaggccataaattaatcggaatcagaggtatgccgcgtgtggggaaaacggaatcgattgtagcctctagtgtgtgtgcaagcaaaaggtggctgtttgtgtcatcaaccttgctgaagcagacgataagaagccagctgattgccgatgaatacagcactgaaaatgtctttatcgttgacggaattgtgtcaacacgaagaggatcggaacgccatctccagctggtccgagaaatcatgcggctgcctgcaacaaaagtggtggagcatccggacatattcgttcaaaatacagagtatacattagatgactttgattatattattgaactgagaaatgaccctgatgaggttattacatatgaacatgccgaggaaccccaaatgtttgatcaatccgggttttcaagctttgatttttaaaattggaaggtgtttgttgtgactgaactaggaatccggctcaaagaagccagagaggaaaaagcaatgtcattggatgatctccaagcggcaacaaagattcaaaaaaggtatttaaccgccttggaggaaggaaactatgacattattccggggaagttttatgttcgggcattcatcaagcaatatgcagaagccgttgggcttgatgcggatcagctgtttgaggagcataaaaaagatatccctaatacgtatcatgacgatgtgtctgaaaagatctccggcatgaatcttcaaaaggaaatgccaaagccagcatctaaggcgctggagctgctgccaacgatacttgttattctcggcgtgattgttgtgattgccattgtgtacgcgatcattcaatttgccaatcacaaaaacagtgatgatcacaatgcggcatcagaaaaagcaattacgcaaagtgagagcaaatacgaaatccctaaagattcaacgctgaaagagaatcaaaataacagctctgaaaaagagacagacactaaaaaagaaacgaaagaaaacgaagataagaaaaaagaaaatgacagtgagaagctggagattaaagctgctggcactgaaggatcgttaacgacttatgaagtgtccggcgctgataaaatcgagctggaactgaaggcatcagacagctcgtggattcgagtgcgcgatgaaaacagcagctctttaaaagaaggaacgctgaaaaaagacgaaacctataaaaaagacataactgatcagaaacaagttgatatccgcaccggatatgcacctaatctgaaaataaaaatcaacggtaaggttctttcatatgaacttgatccgaaaaaagtgatggcacaaaccataaagattgtaaataaaaaggaagaaaagtcatcttaattatcagatgacttttcttcacgtccgagtatgaaattggaggggctttatgtttaacttaccaaataaaatcacactagctagaatcgcattaatcccaatcttcatgattatcatgctggcgccgtttgactggggcaggctcgaagttggagacgaatcaatcccggtcgcacatttggcgggggccattctatttattattgcatctacaacagactgggtggacgggtattatgcccgaaaattgaatctcgtaacaaacttcgggaaatttcttgatccgcttgcggacaaactgctcgtatccgcagcgttaattatccttgttcaatttgatctcgctccagcttggatggtcattgtgattatcagcagggagtttgccgtgacaggtttaaggcttgttttggccggaacaggagaagtcgtagctgctaacatgcttggtaaaatcaaaacctgggcacagattattgcggtatccgcattgcttcttcataatcttccatttgaacttgtgtcattcccgtttgcggacttggcgctgtgggtagccgtcttctttactgtcgtttcaggctgggaatatttctctaaaaactgggaagcgttaaaaacatctaactaagaaagaaggacttcgtcatggaatttccaaaaaaagcagaaataattgcagtcggttcagagctgctgcttggccaaatcgccaatacaaatgctcaatttatcagcaaacagctcgctgaaatcggggtcaacgtattttatcatacagcggtcggagataacccggagcggctgaagcaggtcatccgcattgctgaagaacgctctgacttcattattttttcaggagggcttggacccacaaaagatgatctgacgaaagaaacgattgcaaatacgctgggacgtccgcttgtgttaaatgatgaggcattccaatccattgaggactatttcaaacgaacaaaacgcacgatgtcacctaataaccgaaaacaggcgcttgtgatcgaaggctctgacgtgctggcgaatcactttggaatggccccgggaatgctcacagagcatgaatcgcgctattatatgcttcttcctggaccgccgagcgaattgcgtccaatgtttgaaaacgaggcaaagcctcttctgctgaaaaagatgggttcaaatgaaaaaattgtgtcaaccgttcttcgctttttcggtatcggtgaatctcagcttgaagccgatttggaagatattattgatgcacaaaccaatccgacaattgcgcctttggcggctgatggagaggtgacgctgcgtctgacagccaaacacgccgatgaaaaggaaacagagcgtctgttaaaagaaacagaggccgttatcttagagcgtgtcggtgaatttttctatggttacgatgatacttctcttgtaaaagagctatctatagcgtgtaaggaaaaaggcataacaatttctgcggcagaaagctttaccggagggctgttttctgaatggctgacggatcatagcggtgcctcaacattatttgccgggggcgttgtttgctatacaaacgacgtgaagcagaatgtgcttggtgtcaagaaggaaacattagatcgttttggggcggtcagcaaggagtgcgcatccgaactggctaagggtgttcaaaaactcactggcagcgatatcggcattagctttactggtgtagcaggacctgatgctcaagaagggcatgagcctgggcatgtgtttatcggcatttccgcaaacggtaaagaagaggttcacgagtttcactttgcgggctccagaacggggatcagaaaacgcggcgctaaatacggctgccatttaatcttaaagcttttagagcaaaaataatattttcagcacattatcctcctaagaaaacatgatttctctgatacattatgatattttgataggaatcacgccaagaaaaaatccgaatatgcgttcgcttttttcttggcaaatcccttcaaacagggtatagtatatgtagtggtaacataaaggaggaaaaaatagaatgagtgatcgtcaggcagccttagatatggctcttaaacaaatagaaaaacagttcggcaaaggttccattatgaaactgggagaaaagacagatacaagaatttctactgtcccaagcggctccctcgctcttgatacagcactgggaattggcggatatcctcgcggacggattattgaagtatacggtcctgaaagctcaggtaaaacaactgtggcgcttcatgcgattgctgaagttcagcagcagggcggacaagccgcgtttatcgatgcggagcatgcgttagatccggtatacgcgcaaaagctcggtgttaacatcgaagagcttttactgtctcagcctgacacaggcgagcaggcgcttgaaattgcggaagcattggttcgaagcggggcagttgacattgtcgttgtcgactctgtagccgctctcgttccgaaagcggaaattgaaggcgacatgggagattcgcatgtcggtttacaagcacgcttaatgtctcaagcgcttcgtaagctttcaggggccattaacaaatcgaagacaatcgcgattttcattaaccaaattcgtgaaaaagtcggtgttatgttcgggaacccggaaacaacacctggcggccgtgcgttgaaattctattcttccgtgcgtcttgaagtgcgccgtgctgaacagctgaaacaaggcaacgacgtaatggggaacaaaacgaaaatcaaagtcgtgaaaaacaaggtggctccgccgttccgtacagccgaggttgacattatgtacggagaaggcatttcaaaagaaggcgaaatcattgatctaggaactgaacttgatatcgtgcaaaaaagcggttcatggtactcttatgaagaagagcgtcttggccaaggccgtgaaaatgcaaaacaattcctgaaagaaaataaagatatcatgctgatgatccaggagcaaattcgcgaacattacggcttggataataacggagtagtgcagcagcaagctgaagagacacaagaagaactcgaatttgaagaataaaaataaaataagtttcaaatgatacaaaaggctgagtgaaaaactcagcttttttgtattttgcaaaaaaatgataaaaatattgctttttttgacaacttttttagggctttattcgtctaacaaaacgtgtgcaaaatggaatttattttgggaggaaaaaatgaatgacaagcccaacccgcagaagaactgcgaaacgcagacggagaaaactaaataaaagaggaaaactgttgcttggtcttttagcagtgatggtttgcattacgatttggaatgctcttcatcgaaatagtgaagaaaacgaaccatctcaagaaactgcagcggtttcaaataccgatcagaaaaaagaggtcaaaaagaaaactgccgaaaaatcagaggaacaaatcaaaacagtggatcgaaaccaaaaaatcagcaattatttaaaagagatcggtttcagcggaacagccatgattgtcagaaatggagaaatcgtaacaaataaaggttttggctatgctgaccgtaaacactacattcaaaataatccattgacatctttttatgtcggttcatcacaaaaagcgctaattgcaactgctattttgcagcttgaggaaaaggggaaacttcagacaagtgatccggtaagtacgtatttacctcattttcctaacggacaaacgattactttgaagaatctgcttacacatacatcggggataaacggacatattgaaggaaacggcgccattactccggacgatttaataaaagatatagaacttcagggaatcaaacgtcagccgggcgtatgggactacaaggattccaactattctgttcttgcttatattattgctgaagtaagcggtgagccctatgaacagtacataaagaatcatatttttaaacctgcgggaatgacgcatgcaggcttttacaaaacatatgaaaaagaaccttatcctgccgtcgggtataagatggagggcagcaaaacagttacaccgtatatacctgatttatcccagctgtatggagcgggtgatatttatatgagcgctatagatatgtacaaatttgaccaagcgctgatagacggaaaactgtattcgcaaaaaagctatgaaaagatgtttacgccagggagcagctccacatacggcatgggattttatgttgctcccggaagctattcaaaccatggtgttatgccgggcttcaatatcttgaacagctttagcaaatctgggcaaaccattgttattttgttctcaaacattcaaaataatgctaaattgggccaagtgaacaataaaatataccagcttctaaatcaagaatgattggcgatcttcttttggatgaattgcattcggcacgtgaaaagaagactggcctgcaaacgttaagatggcaagcttgacaagtatttccgacacatttacaatgaagttgtaacatttgtttttttaacatgattgttaaaccatttaaacttgacaagggcgatgaacacactcattccctgtgaaggttctgtatgttgagaaaactagacaatgtacatgccgacactttttaagcaacaaccaagttcatagcaagaggaggtgaaagtatgaccccaattatgatggttctcatctccattttgctgattctactcggtttagttgttggctactttgttcgtaaaaccattgccgaagcgaaaattgcgggcgcacgcggtgcagccgagcaaattcttgaagatgcgaagcgtgatgctgaagcactgaaaaaagaagctctgcttgaagcaaaggatgaaatccacaaacttcgaatagatgctgaacaggaagttcgtgaaagacgaaatgagcttcaaaaacaagaaaaccgtttactccaaaaggaggaaaaccttgatcgcaaacatgagggaattgataaacgggaagcgatgttggagaagaaagatcattctctgaatgaacgacaacaacatattgaagagatggaaagcaaagtggatgagatgattcgtatgcagcagtctgagttggaacgaatttcgagtctaactcgtgacgaagcgaaacaaatcattcttgagcgggttgaaaacgagctttcacatgacatcgccatcatgacaaaagaaactgaaaaccgtgcgaaagaagaggcggataagaaagcgaaaaacattctttcactcgccttacagcgctgcgcagcggaccacgttgccgaaacaacggtatcagttgtcaatcttccaaatgatgagatgaaaggacgtatcatcggacgggaagggcgtaacattcgtacgcttgaaacgctgacaggaattgacctgattattgatgatacgcctgaagctgtcattctttccggatttgatccgatcagacgtgagacagccagaattgctcttgataaactcgttcaggatggccgtattcatccggcacggattgaagaaatggttgaaaaatctcgccgcgaggtcgatgactatattcgtgagatgggtgagcaaacgacatttgaggttggcgttcatggcctccacccagatctcatcaagatcctcggccgcttaaagttccgtacaagctacggtcaaaatgtgcttaagcattccatggaagtcgcattcttggccggtctaatggcatcggagcttggtgaagacgcaaagcttgctaaacgtgcgggtcttcttcacgacatcgggaaagcaattgaccatgaagtagaaggaagccacgttgagatcggggtagagcttgcgaccaaatataaagagcacccagtcgtgattaacagtattgcatcacaccacggggacgaggagccgacttccattattgctgtactggtagctgcagcagatgcgctttccgctgcaagacctggcgcaagaagtgagacgctcgagaattatattcgaagacttgaaaaactcgaagaaatttctgagtcctacgaaggtgttgaaaaatcatttgccattcaggctggacgcgaagtgcgaattatggtgaagccggattcaattaatgatcttgaggctcatcgactggcgcgagatatccgcaagcgaattgaggacgagctcgattatccaggtcatattaaggtgacagtaatcagagagactcgagccgtagagtatgcaaaataaagtgatgcgctaagcatcactttatttttttgacggcaaggaattttcaagaagaaaggatttacaaaatgagaattttatttatcggagatgttgtcggttcaccgggccgtgacatggtcaaagaatatgtaccaaagctaaaaacaaaatataagcctcactttaccattattaatggtgaaaacgccgcacatggaaaaggcctgacggaaaaaatttatcacagcttaatccagtccggggcagatgcaatcacaatggggaaccacacatgggacaaaaaagaaatatttgattttatagatgacgttccgaacttggttcgcccggcaaactttcctgaaggaacaccggggaaagggatcacatatgtgaaagcaaacggcaaagaactagcagtcattaatttgcagggacgtacgtttttgccgccgcttgatgacccgtttttaaaagcggatgaattgatcgcagaagccgcgaaaagaacaccgtacatttttattgactttcatgccgaagcgacaagtgaaaagctcgcacttggctggtacacggatggacgggcatcggctgtagtaggaactcatacacacgtgcaaacagcggataaccgcattttgccgaagggaacggcatatattactgatgtgggaatgactggcccgtatgacggtatactggggatggacagagagacgattattaagcgattcaaaacgaaccttccagtccggtttactgtcgctgaaggaaaaacaacgctcagcggagttgtcattgacattgacgatcaaacgaaaaaagccgtgaaaattgagcgtattttaatcaacgatgatcacatgttctttgaatagttgaacatatggttattttataaaaatattaaaaagaaaagcaggaatatagcaactccttagtgaatatagtaaaaatggaaggtagcccgctatttttgaaaagcattgtggggatggctttttggatagcaacatctaataatgattgttctaatgaacactcacttatccattgtaaaactaagggggagcagaaatggaaatcttaaaagtttcagcaaaatcgagtccaaattcagtggcaggtgcgcttgcaggcgtgttgagagagcgaggagccgccgagattcaagcgatcggagcgggtgcattaaaccaggctgtaaaagctgtggcgattgccaggggatttgtggcgccaagcggcgttgatttgatttgtattccggcttttacagatattcaaatcgatggggaagaaagaacagcgattaaattaatcgtggagcctcgctaaaaacaaataaagcattctcaacctgtttgcgtaatgcaaacaggttgtttttcatttattgtgatattttctcccgatagtatttttagcacataaatgagcgaatatacaaaatcagaaatgagctaaaacgtttcaaaaaaaatttccgcccatttttcaagacagatacttttgtccttctggaaaagacagtgctgtttacgcttattccatatcatggtacaatccgaatataacaagaatttttcaaggaggattgtacatgcagagtggaaagatgaaagctctaatgaaaaaggacggggcgttcggtgctgtgctgactgaagttcccattcctgagattgataaacatgaagtcctcataaaagtgaaagccgcttccatatgcggcacggatgtccacatttataattgggatcaatgggcacgtcagagaatcaaaacaccctatgttttcggccatgagttcagcggcatcgtagaggacgtgggagagaatgtcagcagtgtaaaagtgggagagtatgtgtctgcggaaacacacattgtttgtggtgaatgtgtcccttgcctaacaggaaaatctcatgtgtgtaccaatactgctataatcggagtggacacggcaggctgttttgcggagtatgtaaaagttccagctgataacatttggagaaatcccgctgatatggacccgtcaattgcttccattcaagagcctttaggaaatgcagttcataccgtacttgagagccagcctgcaggaggaacgactgcagtcattggatgcgggccgattggtcttatggctgttgcggttgcaaaagcagcaggagcttctcaggtgatagcgattgataagaatgaatacaggctgaggcttgcaaaacaaatgggagcgacttgtactgtttctattgaaaaagaagacccgctcaaaattgtaagcgctttaacgagtggggaaggagcagatcttgtttgtgagatgtcgggccatccctcagcgattgcccaaggtcttgcgatggctgcgaatggcggaagatttcatattctcagcttgccggaacatccggtgacaattgatttgacgaataaagtggtatttaaagggcttaccatccaaggagtcacaggaagaaaaatgttttcaacatggcgccaagtgtctcagttgatcagttcaaacgtgatcgatcttgcacctgttattacccatcagtttccgttagaggagtttgaaaaaggtttcgaactgatgagaagcgggcagtgcggaaaagtaattttaattccataaagggggataaacatgacgaaggaatttgagtttttaaaagcagagcttgatagtatgaaagaaaaccatacatggcaagacataaaacagcttgaatctatgcagggcccatctgtcacagtgaatcaccaaaaagtcattcagctatcttctaataattacctcggattcacttcacatcctagactcatcaacgccgcacaggaggccgttcagcagtatggagccggcaccggatcagtgagaacgattgccggtacatttacaatgcatcaagagcttgagaaaaagttggcagcctttaaaaaaacggaggcggcacttgtattccaatcaggcttcacaacaaaccaaggcgtactttcaagtattctatcaaaagaggacattgtcatctcagatgaattgaaccatgcctctattattgacggaattcgactgacaaaggcggataaaaaggtgtatcagcacgtcaatatgagtgatttagagcgggtgctgagaaagtcaatgaattatcggatgcgtctgattgtgacagacggcgtattttccatggatggcaacatagctcctctgcctgatattgtagagctcgctgagaaatatgacgcatttgtgatggtggatgacgcccatgcatccggagtacttggcgaaaacggcaggggaacggtgaatcacttcggtcttgacggcagagtgcatattcaggtcggaacattaagcaaggcaatcggagtgctcggcggctacgctgcaggttcaaaggtgctgatcgattatttgcgccataaaggccgtccatttttattcagcacatctcatccgccggcagtcactgcagcttgtatggaagcgattgatgtcttgcttgaagagccggagcatatggagcgcttgtgggagaatactgcctattttaaagcaatgcttgtgaaaatgggtctgactctcacgaagagtgaaacgccgattcttcctattttaattggtgatgaaggtgtggcaaagcaattttcagatcagctcctttctcgcggtgtttttgcccaaagtatcgttttcccgactgtagcaaagggaaaagccagaattcgcacgattataacagcagagcacaccaaggatgaactggatcaggcgcttgatgtcatcgaaaagacggcaaaggagctccagctattgtaacaagaggaagagtttactcttcctcttttgattccttattgattattattctcaatgagtgtacaatgataggttgccagttgtgcagagcttcaataacctttatactgaagggtggaagtttggtttgaaaggagaaaatatgacatgaatgaaaaacaaaaattagagagcggacaagttaatccatcggacaaaaaatccgagaaggattacagcaagtactttgaagctgtttacattccgccttctttaaaagacgcgaaaaaacgaggcaaggaagccgttacttatcataatgactttaaaatttctgaacaatttaaaggattgggagacggaagaaagttctatatccgtacgtacggctgccaaatgaatgaacacgatacagaggttatggcagggatctttagggcgctcggttacgaagcgacaaactctgttgacgatgccaatgtcattttgttaaatacatgtgcaatccgtgaaaatgctgaaaacaaggtgtttggtgagctcgggcacttaaaagcactgaaaaaaaacaatcccgatctgattttaggcgtgtgcggctgtatgtcccaagaggaatcagtcgtgaaccgtattttgaaaaaacatccgtttgtcgatatgattttcggaacgcataacattcatcgcctgccggagcttttgtcagaagcatacctttcaaaagaaatggttgtagaagtttggtctaaggaaggggacgttattgaaaaccttccgaaagtccgaaatggaaaaattaagggctgggtcaatatcatgtacggctgtgacaaattctgtacgtattgcattgtgccttacacacgcggaaaagaaagaagccgccgccctgaggatatcattcaggaagtgagaaggctcgcaagtgaaggctataaggaaattactctgttaggccaaaacgtaaacgcgtatggaaaagactttgaagatatgacgtacggacttggtgatttgatggatgaactgagaaaaatcgatatcccgagaatccgttttacaacgagtcatccgcgcgactttgacgaccgcctcattgaagtgctggcaaaaggcggaaatctgcttgatcacattcatcttccggttcaatcaggaagctcagaagttctcaagctgatggcccgcaaatatgacagagagcgttacatggagctggtgcgaaaaattaaagaagcaatgccaaacgcttctttgacaacggacattatcgtcggatttccaaatgaaacggacgaacagtttgaagaaacgctttctctataccgtgaagtggagtttgacagcgcctatacgttcatttactctccgcgtgaaggcactccggctgctaagatgaaagataatgtaccgatgcgtgtgaaaaaagaacgcctgcagcgtctaaacgcactggtgaatgaaatttctgctaaaaaaatgaaggaatacgaaggcaaggttgtcgaagtattagttgaaggtgaaagcaaaaataaccctgatattcttgcgggctatactgaaaaaagcaagcttgttaatttcaaagggccgaaggaagccatcggcaaaatcgtccgcgtgaaaatccagcaagcgaaaacatggtcgcttgacggagaaatggtaggagaagcaatcgaggtgaaataagatgacgctctactcaaaaaaagacattgtgcagcaggcacgaaaccttgcaaaaatgatctctgaaacagaagaggttgattttttcaaacgggctgaagcgcaaatcaatgagaatgacaaagtgtccacaatcgttaatcagattaaagccctgcaaaagcaggctgtcaatctgaagcattatgaaaagcatgaagcgctcaaacaagtagaagcaaaaattgacgcgctgcaagaagagcttgaagagattcctgttatccaggaattcagagactcgcaaatggaagtaaatgacctactgcagctcgttgcacacaccatttccaaccaagtcacaaatgaaatcatcacatcaaccggaggcgacctgctgaaaggggaaaccggttcaaaggtgaagcattcaaataacagctgttctctctaaacacggtgcctttacaggcccgtgtttttttatgtgtgggttatgaactaaataatctatgtaccaaatgttcaattggtttttctgtgcgcagccgcgtgtaaactttatcgcacttataagtaaagtttctaggctcacctgcatacaatggaacagaaactttgtatttttatattttatttataaaaatgcacactagacaaatgcccagcataagataacacgaagaagaacaaggaggcatgccggaatgtctgaatacagggaaattattacgaaggcagtagtagcgaaaggccgaaaattcacccaatgcaccaacaccatctcgcctgagaaaaaaccgagcagcattttgggtggttggattattaaccacaagtatgacgctgaaaaaattggaaaaacggtagaaattgaagggtattatgatataaacgtatggtactcttacgcggacaacacaaagacagaggttgtcacagaacgggtaaaatatgtagatgtcattaaactcagatacagagacaataattacttagatgatgagcatgaagtgattgccaaagtgcttcagcagccaaactgccttgaagtgaccatttcgccgaatggaaataaaatcgttgtgcaggcagaaagagaatttttggcggaagtggtaggggaaacaaaggtagttgttgaggtcaatcctgactgggaagaggatgacgaggaagattgggaagatgagcttgatgaagagcttgaagacatcaacccggagtttttagtgggagatcctgaagaataaaaaagggactaggggagacagtacccccaagtctcttttttatattgatatatcattcttttatcactttttgtttatgttataatgaaggttggaaaatagaaacgttgatacatagtgagggattaaacaatggccggttatacgcctatgatacagcaatatttaaaaataaaggcagagcaccaggatgcctttttattttttcgcctgggtgatttttatgaaatgttttttgaggacgccaaaaaagcgtcacaagagctggaaattacgttaacgagcagagatggcggtgcggctgaaaaaataccgatgtgcggtgtgccgtatcattctgcttccgcgtatatcgaacagcttattaaaaaaggatacaaagtggcgatctgtgaacagacggaagatccgaaagccgcaaagggcgttgtgaaaagagaagtggttcagctgattacgcccggaactgtaatggacggcaaaggcatccatgaatcggaaaataattttatcgcatctgtttcagcctgctcgaacggatacggacttgcgctgtctgatttaacaacgggagaaaatttggctgttttgattgaacggcttgaagacgtcatatcagaaatttattcagtcggcgcacgggaaatcgtggtttcaggaagcttggatgccgatacagtggcacagctgagagagcggtgcggtgcaacgatctcaattgaagatggagaaacagacgaacacgtaacgatcattgagcacttaaataatgaagatataacaaaaacatttatgcgcttatatacgtatttgaaaagaacccaaaagcgcagccttgatcatcttcagcccgtgcaggtgtatgagcttgaggaagcgatgaaaattgacttgtactcaaagcgtaatctggagctgaccgaaacgattcgttcgaaaaataaaaaaggctcccttttgtggctgctggatgaaacaaaaacggcaatgggaggccggctgcttaaacagtggattgaccggccgcttatcagagtcaatcaaatcgaagagcgccaagaaatggtggaaacattaatgtcccatttctttgaacgggaagatctgcgtgaacgtttaaaagaagtatatgacttagaacgccttgccggacgcgttgcattcggaaatgtcaatgcccgggatttgattcagctgaaggaatcgttaaagcaagttcctggcatcaaacagctggttgcttcactggctcatgacaaggccaaggaacgtgcagagcgcattgacccttgcggggatgtacttgaactgctggaagaagcgctgtacgaaaaccctcctttatcggtaaaagaagggaatctgattaaagatggttataatcaaaagcttgatgaatatcgtgatgcaagcagaaacggaaaagactggattgcccgcctggaacagcaggagcgggaatacacaggcattcgttctttaaaggttggctttaataaagttttcggttattacattgaagtgacaaaagcaaatttgcacttgcttgaggaagggcgttatgagcggaagcagacgttaaccaatgcagagcgctacattacacctgaattaaaagaaaaagaagcgctcattttagaggcggaaaataacatctgtgaactggagtacgagctgtttaccgagctgcgcgagaaggtgaagcagtatattccgcggctgcagcagcttgcaaaacagatgagcgagctggacgcactgcaatgctttgcgacaatcagtgaaaatcgtcactacacgaaaccggagttctctaaagatgaagtcgaagtgattgaaggcagacacccggttgttgaaaaagtcatggacagccaggaatatgtcccgaacaactgtatgatgggcgataacagacaaatgcttctcattacaggtccaaacatgtcagggaaaagcacgtatatgagacaaatcgcgctcatttccattatggcgcaaatcggctgctttgtacccgcgaaaaaagcggtgcttccgattttcgatcaaatttttacgcgaatcggcgctgcagatgatttgatttccggacaaagtacatttatggtagaaatgcttgaagcgaaaaatgcgattgtcaacgcgacgaaaaacagcctcattctgtttgatgaaatcgggcggggaacgtccacttatgacggcatggcgctggcacaggcgattattgaatatgttcacgatcatatcggcgccaagacgctgttcagcacacactatcacgagctgaccgttcttgaggacaagctgccccagctgaaaaacgttcatgttcgcgctgaagaatataacggaacggttgtctttcttcatcaaattaaagaaggtgccgctgataaaagctatggtatccatgtagctcagcttgccgaactgccgggagatctgattgctcgcgctcaagatattttaaaagagcttgagcattcaggaaacaaaccggaagtgccggtgcagaaacctcaggtgaaagaagagccggcacagctgtccttttttgacgaagcggaaaagccggctgaaacaccaaagctttcaaaaaaagaaaagcaagtgatcgatgccttcaaatcacttaatatactggatatgacaccgcttgaagcgatgaatgaaatgtacaagctgcaaaagaaattacattaaaacggggtgatgaatgtggcaaaagtcatccagctgtcagatgagctttcgaataaaatagcggcgggcgaggttgtggaacggcccgcctcagtcgtcaaagaattggtggaaaatgcgatcgacgctgacagcacagtcattgaaatcgatattgaggaagcaggccttgcatccattcgggtcttggataacggcgaaggaatggagaatgaagattgtaagcgtgctttccgccgccacgcaacgagtaaaataaaagatgaaaatgatttattcagggtgagaacgctcggtttcaggggagaagccctgccgagtatcgcgtcagtctctcatctggagattacaacaagcactggtgaaggagctgggacgaagctcgtcctccaaggaggaaacatcatttccgaatcgcgttcctcaagcaggaagggaactgaaattgtcgtttccaacctgttttttaacacaccggcccgtttgaaatatatgaaaaccgttcatacagagcttggaaacattacagatgtggttaaccgtattgctctggcgcatccagaggtatcgatccgcctgcgccatcatgggaaaaacctgcttcaaacgaacggaaacggagatgtgcgccatgtactggcagcgatttacggcacggctgtcgccaaaaaaatgcttccgctgcatgtgagctccttggattttgaagtaaagggatatatcgccctcccagagattacacgggcgtcgagaaactatatgtcgtctgtggtcaatggccgttacattaaaaatttcccgctcgtcaaagcggttcatgaaggctatcatacgcttctgccgatcggacgccatccgattacttttatagaaattacgatggacccgattttagtcgatgtcaacgtgcatccatcgaagcttgaggtccggctcagcaaggaaacagagcttcatgacttaatacgtgacggaattaaagatgtgtttaaacagcagcagctgattcctagtgcccaggtcccgaaaaaatcagcacctgccatcaaaaatgagcagcagtttataacctttgatgaaaagcctccggaaaaaaaagttccggaaaaatcgactgcgccatcttattcaccgatgaagctcagctcagtcgtaaaagagccggttgatgcggaggaaaaattgccccctctccaatttgatgctcctcctatcgttgatcaggaacaaacccttgaggtgtccgatgtttcagcagaacagcctgaaacatttgagcaggaatgccatgaggaacagccgcagccagcgtctgatcgggttccaattatgtacccgattggccagatgcacgggacttatatattggcacaaaacgaaaacggcctatatattatcgaccagcacgccgcccaagaacgtattaaatatgagtacttccgtgaaaaggtgggggaggttgagcctgaggtgcaggagatgattgtaccgctgacgttccactactccacaaatgaggctttgattattgaacagcacaaacaagagctcgaaagcgtcggtgtctttttagagtcattcggctctaacagttacatcgtccgctgccacccagcctggtttccaaagggagaagaagcagagcttatagaagaaatcattcagcaggtgctcgactccaaaaatatagatattaaaaaactccgcgaggaagcggcgattatgatgagctgcaaaggctccatcaaagcaaatcgccacctcagaaacgacgaaatcaaagcgcttctggacgacctccgaagcacatcagacccatttacatgcccgcacggccgcccgatcatcattcaccactcgacatatgagatggaaaagatgttcaaacgcgtgatgtagcgggggtggtaggcattgatccattctctgaatggatcaatgctttttttgtactccttcgagtgtcagattataagaaacggttgtaaacgtgtgagcagtgttaaagcattatacttcatggtccctccgtataacgaaatttccatttacaggcaattagaattaatgtatattttgggtgagggggtggaaacacatggcatgtggtccgaagatcattatctttttggatgaacttgatgatccgaatgtaagaatcattttagaatgcagaatttaaattacaacattgtgttttgctccctgttcgtgtgaacagggagttttttcgtttatataactggtgatgtccaaatataaggtgttatgaattctccatatctgccatcggcattttaagctgcttctctattaggctggtcatcaaaagcaagttcagtgaaagccatcactgctgatatcacaacaagcaagatatctggaatataaatagactgcataaagtaatctgcaaaacagatcgttataagattgctgataaaatacagtataaaagcaaaaagtgcagtctttttcaatgaaagtgattttgccaaaatgatagagataatctttgtgagtgggtctatgattaaacctacagcaaagcaggctaaaataaataaagctaatgtttgattggaagcgtatgtgatgcccagtatggagaataagcctttcatcccgaagaaaaagccgccgaagatgactgcaagcgcaatggccgcgataaaagtgatagatacaattccgattaattttgatctgaggttaaaatctttagagtgctcgttctgttctttatggttcaagtatgacactcccttcacctgcttactcatacaaacagcacccttgaatcagcccaaaatatctataagtctgttttctgacgaaaatagtatagcatattttaacaaaaccaaaaaaggccctttccactggggaagggcctttttcatcatgttaactcctgagattcgccgaagctttctctttttttggccaaataaaatagctggctgtaatgagaaagtcaattcctataatgacagtccacagtttaagaatgccgctcaacgcctcggttcgggaagagtcattgataaaatagatcatccctgccaatagtcccgcaccaattaagtaggccagcacatgtcttagccagcctttcgcaccgtgtttggcatgatccattccaaaacgtttcagcggttttgcgcctttttttgtcacataatattgaaatttttcatctgcccattgaatcatttgtttcccataagcgatcgatataccgatgtaaacagctgcaatcccatgggctgcggtcgctgaggctccgcggtaaaggtccacaccagttgccgctaacaagatcaaatcgataactggagttaaggcaaggaatagcagtcctaatgtatgtcgtttgaatacgtagcgtacagcaagccccaaaacaatgacaacccaaaacgcaatttcacagaaaacaatcatccatgcgataccgttcaatccattcccctcttttcaatacagttgtattatttaaataatatgttaccatctttgtttttgtaacacaactgtattataaaaattgccctctcatttttttcttgttacaataaagctatgccaaaacaaattgaccatgagaaaagaagaaaacaaattgcagaagcaacgtggcgcgtcattttagaacgagggatggagggagcatcagccagaaatattgcaaaggaagcaggattgtcattaggtgcgctgcgccattatttctctacacaggatgaattgcttgcttttgcaatgaaacttgtccaagaaaaggtgacggaccgaattaaggacattgcagtgagggatttgctccctaaggaaaaagtgttgcaaattttgcttgaaatggtcccgacgaatgaagaaacgattagagagatggaggtttggtttgcttttactgcttacgccagacataaaaaggatatgtttgatgcgaatcatgacgggattttcagcggcatgcggaatctgattgcctatttagatgaatccgatttactgaagccgaatgctgataaagacattgaagctgagagactttacgcgcttgttgacggcttggctttacatgccatgcttgaccctgtgcgagtgaataaagaccgaatcaagcgggtcattatgcagcatgtagagtcaatttgcgtggaagatacacgtgagacacaaaaacgtcatccttaaggcactagtgcgaaaagcgattcttgttgggcatgcgtccaaaagagtcgcttttttatattcaaagaacaaggatctctgaaaaaaatggaaaacgatcatgctgtttggtaaagtggaatgaaagacggactgaggagtgaacactggtccatcgtttaagaactttacatgatagggatggtataaatgaatcttacttacaaagtgcatccaattaaaacaaggtatcagggctggacgaattattgctatatcattgaagatattgtaagcagatctgcaattgttgttgatccctcatgggaattgagtaagataaccactacactttctgaactcgaagcggaattaaaggcagtcgcattgacacactctcattatgatcatgtaaatctggtagacccgctgacgaagatgtttaacgctcaagtttatatgtcaaaaaaagaaattgattattatcaattccgatgcagaaatttaattagcctagatgatcatcagacaatcagcataggaaacacaagagcacaatgtcttctcacaccggggcatacagccggcggaatgtgttatttgttttctgagagtatttttaccggagatacggtgtttacagaagggtgcggcatatgtgaggatgatggcagctctgcggaagagatgtttgatagtattcaaagaataaagtcggaggtttcacctcatgtacgggtgtatcctggtcactcatttggcaaatcgcccggtcattcgataaaggatctttatcagcataatatttactttcaaattgataaaaaagaatattttgtgaaatttcgcactcgtaaaaaccaaaaaggtatttttgattttaaataatccttctgaatctattatcctatttttcttcgaatatctaaatgatttttattttcaaaaatgattacatagaaggtgttatttattttgaaaactcatttgaaagaaaatgaagcgcattatcatgatatggcgccctatacgtgatctgggtcttttttcttatgttctgttatatctcctgatcctttattcctcaatggaaaaaagcagaaaaacaatcgagcaaactgtaggaaaaattaacttgacggataatatttacagaggttaccatcaacatgaacatgctactatttatccggtcatcactattataaaatcatacagaagtgaaatacatctactaatcggaagggtggctttgagagaatgatcacatatgtttttccaggtcagggttcacaaaaacagggaatgggcagcggcctattcgatgaatttaaagaactgacggatcaggcagatgagatcttaggatattctatcaaacgtctttgcctggaaaatccttattccaatttaaacaaaacgcaatttactcagccggcattatatgtggtaaacgcactaagctatctgaaaaaaatcaaggatgaagaagttaaacctgactttgtcgccgggcacagcttgggtgaatacaatgcgttatttgcagctgaagcctttgattttgagacaggtttacagcttgtcagaaaaagaggcgagctgatgagtctgataagcaacggcggtatggcagctgttatgggactaaatgaagagcaggttgcaaaggctctgaaagaatatcatttacatgatgttgatatcgctaatgtgaatgccccatatcaaattgtaatttcaggaaaaaaagatgagattgaaaaagccgcatctctttttgaaacgatgactgaagttacaatggtactccccttaaacgtaagcggcgcgtttcattccagatacatgaataaggcaaaagaagaatttgaggagttccttcatgccttttatttttcgcctccgtctatcccagttatttctaatgtgtatgccaaaccgtatacatacgaattcatgaaacagacgctggctgatcaaattaatcattcagtgaaatggactgacagtataagctacttaatgaaaaaaggccatatggagtttgaggaggtagggcctggaaatgttttaactgggttaattcatcgcataaagaaagatgcggaagcaatgcccagctaaagcatttgcccctatggccgtgcacctcatcaatcaggtctaaacacagatttcctttcatttaaggtataaagttttaaagattcaatcgttcgattgacactgtttctaattgaataactttatatactgttacataaagaggctgataaattaagttagacatttgaactatgtcagccggtctgtcaaaccatcgctcccacatctagatggtccattttttaaccgcacccaccaatcatagagtcgatgttctttgctgatcctgttatcatgttacatcaattttgagatatcaacatacatctacgatcacgtcataaatgaaccgcatccagagcaccaatagcaatccttccaagttgaatctcctttactttttcacatatgtcttttccgtttattaatttcatttcaatcgctgctatgtgctttaacaacatgcatggaaatgagaaatccaatagccgtcataaatataaaaaaagaaggttatacacatgaatgaaccgcttgtttttatgttttccgggcaaggttcccaatactatcacatggggaaagaactatttaaggaaaataccgtgtttcgtcaatcaatgcttgaaatggatgccattgcagcacggcgaatcggcacatccattgttgaagaaatctaccatccaggtaaacgtgtgtcagatccgtttgacagtattcttttttcccaccccgccatttttatgattgagtattccttatataaggttttggaagacaggggaatttatcctgattacgtattgggatcaagtctgggagaattcgcagcagcggcagtttctggtgtgtcagacgcagaggatatactggattgcatacttgaacaggctattatcatccaaaattcctgcgataaaggaaaaatgatggccattctggacaaaccgcaattgctgaatgattatccgcaactgtttggaaatagtgaactcatttctatcaattatgattcgcacttcgtcatttctggtgaagaagatcatataaggaagattatggaggatttaaaggagaagcagattctttgccagctgcttcctgtgtcctatgcctttcattcttcgcttattgatccggcagagagtgcctatgcagaatttttaagatcaaaatcttttcaaaaaccgtcaataccgattgtatcgagcttaacgggaagctgccttcacgtaatggacgagaatttcttttggaatgcggtcagaaagccaatgatgtttcgtgaagcgattcgatatttggaaagccagcatacatgcaagtttatcgatttagggccatccggcaccttagctgcttttgtgaaacagctgattccgggtgatgcagctgaccgttgctgctcaatcataacaccatttcatcaggagctgaaaaatctgaatacggttgagtattaccgtacaccagaaaggaagtttacaagatgattacatatgtctttccagggcaaggctcccagcaaaaggggatgggacaagggctatttgaacagtatcagcatttgacagatcaagcagatcaaatattgggctattcaatagagaagctatgtaccgaaaaatcatatctggatgtaaatcatactgaatacacgcagccggctttgtatgttgttaatgcactcaattacttgaagagagtggaggagaccggcagaaaacctgattttgcggcaggacatagcttaggagaatacaatgcgctgatggcagccggtgcctttgattttgaaaccggattaaggctcgtcaaaaaaagaggagaattgatgggacgaattacagggggcggaatggctgctgtgatcggcctgagtaaggaacaagttacagccgttttagaagagcaccgtcttcatgacattgatgtggcaaatgaaaatacgccccggcaaattgtgatttctggcccgaaaaaagagattgaaaaagctcgggctgtttttgaaagcaccaaggatgtaaagctgtttcatccattaaatgtgagcggagcttttcattccagatatatgaatgaagccaaacaggtatttaagcaatatattgactcattccagtttgcacctttggcgatcccggttatctccaatgtctacgcagagccataccatcaagacagattaaaagatacattatctgaacagatggacaacacagtgaaatggacggacagcattcgtttcctgatgggaagaggagaaatggagtttgaagagattgggcctggaactgttttaaccggtctcattcatcggattaaaaatgaagctgaaccattgacatatataccgaaaaagaaccccgcgatcagtgcgcatctaaaggagaaacgcaatgttcaagctgggattacggcagaatctttaggaagtgctgaatttaaacaagattatcatcttacatatgcttatcttgcaggaggaatgtaccgcggcattgcttcgaaagaaatggtagtaaagctgtcaagagcgggaatgatggggttctttggcacaggaggtctgagcctgaaagaggttgaagatgcgatccatgctatacaaggtgaattagggaaaggacaagcctatggcatcaatctggtccacaatatgaaacatactgaatcagaagaaaaaatgatcgatcttttattgaggaatcaagtgagcattgtggaggcttcagcatttctaagtgtcactcctgcattagtaaggtaccgcgcaaaaggagtgaaacgaaatcaaaatggtgacgttatatgctcaaatcgtctcatagcaaaaatatcacggccggaagttgcagaatcatttctgagtcctgcgcctgagaatatgctgcaaaagcttttaggagaaaataaaatcactatgaacgaagctgagttgttgcggtgcattccgatggctgacgatatttgtgtagaagctgattcaggcggtcatacagatggcggtgtggcatacagcctgatgccggcgatgacatctttaagagatgaaataatgaaaaaatatcaatttcggaaaaaaataagagttggtgcagctggagggattggaacacctgaggcagcgatggcggcttttatgctaggggctgattttattctaacaggctcaatcaatcaatgtacggttgaggcggcaacaagtgataaagtaaaggatttgcttcagcagatgaatgtacaagatacagcctatgcgcctgcaggtgatatgtttgaatcgggcagtaaagtgcaggtgctaaagaaaggcgtgttctttcccgcacgggcaaacaagttatatgaactgtaccagcggtatgggtctatacgtgagctggatgcaaagatgctggcccagcttgaggagaaatactttaaacgcagtatagaagacatatataaagatattgcattgcattatcccgcggcagacattgagaaggctgaacaaaacccgaagcataaaatggctttgattttccgatggtacttcagatacagctcaaaattggcaatcagcggaagcgaacattcgaaggtcgattatcaaattcactgcggtcccgcgctgggagcctttaatcaatgggttaaaggatcgcaattagaaaattggcgaaaccgccatgtggatgaaattgggaaaaaaataatgacagaaacggcagtattgcttcatgaacggatgcaatcgatgtatcagccgtcgcatgaaacagacaacataaaaatgaaagtttgaatattatgaaaaaatacctataaaaatcattaaaataatccctcgaaggagagagcgtattatggataaacagagaatctttgaagtactaatcaccaatatttgcgaggtgcttcctgaattagacggacacagatttgagcctgaagatcagctagttgagctaggagctgactctgtagacagagctgaaattatcacgatggtgctagaggatttatcgctaaaaattcctcgcattgagctatccggggtgaaaaacatcggtgaattagctgaggtgctttatgacaaagtgcaatctgcctgaggtggtggtgaccggtgtaggcgttacggcctccatcggtcaagggaaagaggactttgcttcctcgctgctgtccggcagacatgcctttgatgtcatgaagcgttcaggcagacaaaaagacagccggtttatcggagccgaaattgcgtcattgtcttatcctgaccgactctccaaaaaaatgttgcgaaaagcatcattctccagccgcgctgcattggtaactctcacagaggcttgggaggaggctgaattggacgatgcagattcctcacgtatcgggctggttgttggcgggtcaaattttcaacagagagaaaactttgaagtttatgaaaggtatcaagaccgctccggttttatttctccggcgtatggcctgtctttcatggacagcgatctttgcgggatatgtacagatcagtttggcatcacgggattagcatatacggtgggaggagcctcggccagcggccagttagcagtcattcatgcgattcagcaagtcctgtcaggcgaagttgatacttgcattgcacttggtgctttaatggatctttcttatatggaatgcgaggcgctaagggctttaggcgctatggggacggacaaatatgctgatgaacctgaaaaagcgtgccgtcccttcgatcaaaacagagacgggtttatctatggagaatcgtgcggtgcattggtaatagaacgaaaggagacggctttacgaagaggtcttaaaccttatgcagcattgtctggctggtcaatcaaactggacggaaaccggaatcctgatccttcattagaaggagagattcatgtcatccagcaggcactggagcgtgccaggcttttaccagaagatattgattatattaatcctcatggaacaggctcttttattggagatgaaatagaattaaaggcgctccgtgcatgccggctttcccatgcttatatcaatgcaacaaaatcgataaccggacacgggcttagtgcggcgggcatcgtagagattatttctgttttgctgcaaatgaaaaaatctgccctgcatccgagcaggaatttggatcatccaatcgatgattcctttcattgggtaaatgagaaatcgatttcataccgcatcaaaaatgcgctgagtttaagcatggggtttggcggaatgaacaccgcggtttgtatacaaaacattgagaaatgtggaggcgaatcataaatggtttcagccggaatagaagcgatgaatgtctttggcggaacggcataccttgatgtcatggagctggccaaatacagacacttagatactgcgagatttgaaaacttattaatgaaagaaaaagcggtagcactgccttatgaagatcccgtgaccttcggagtcaatgcagctaagccgattattgatgctttatctgaagcagagaaggaccggattgaattgctgatcacttgctctgaatccgggatcgactttgggaaatcgttaagtacatatatccatgaatatttaggtctcaaccgcaactgccgtttgtttgaggttaaacaggcgtgttattcagggacagcgggatttcagatggcggtgaattttatattatcccaaacttctccgggtgccaaagcactggttatcgccagtgatatttcacgttttttaatcgctgagggcggagacgctttaagcgaagattggtcttatgcggaaccgagcgccggagcgggagcggtggccgttttagttggcgaaaatcccgaggtgtttcaaatagatcccggagcaaatggttattacggctatgaagtgatggacacgtgccgccccattcccgacagtgaagcgggagattctgatctgtctttaatgtcatatttggattgctgcgaacagacctttctggaatatcaaaagcgtgtaccgggtgccaattatcaggacacgtttcaatatcttgcttaccatacgccctttggcgggatggtgaaaggtgcgcaccggacaatgatgcgtaaggtggcgaaggtgaaaacatccgggattgagacggattttttaactcgggtaaaaccaggtttaaactactgtcaacgagttggaaatattatgggggcagccttgtttctggcattggccagcacgatagaccaagggagatttgatacgcctaaacgaattggctgtttttcctacggatccggctgctgttctgaattttacagcggaattacaactccgcaaggccaggagcgtcagcgaacatttggtattgagaagcatttggatcgccggtatcagctctccatggaagagtatgagctattgtttaaggggagcgggatggtgcggtttgggacgcgcaatgtaaagctggactttgagatgataccgggcatcatgcagtccactcaagagaagccgcgcttgtttttagaagaaatttctgagtttcatcggaagtacaggtggatctcgtgacctatcaaacgataaaggtccgctttcaagcgtcggtttgctatattacctttcaccgtcctgaagcgaataatacgattaatgatacgctgatagaagaatgcttgcaagtgttaaaccaatgtgaaacatcaacggtgacggttgtcgttttagaggggcttcccgaggtgttttgtttcggagcggattttcaagaaatctatcaggaaatgaaaaggggcagaaaacaggcaagctcccaagagcctctctatgatttgtggatgaaattgcagaccggcccttatgtcacgatttcgcatgtcaggggaaaagtgaatgccggcggtcttggatttgtatctgccacagatattgccattgctgatcagacggcgtcattcagtctctctgagctgctattcggcctgtaccctgcttgtgttttaccgtttctgatccgccgtatcggccggcagaaagcgcattatatgacgcttatgacaaagccgatttccgttcaggaagccagtgaatgggggttaatagatgcttttgatgctgaaagtgacgtgctgctgagaaagcatttattgcgtttgcggaggctgaataaaaaaggaatcgcacattataaacagtttgtgagctcacttgatcatcaagtcagtcgtgcgaaagccaccgctttaactgcaaatcaagacatgttttctgatcctcaaaaccaaatgggaatcatcaggtatgttgaaacaggacaattcccatgggaggatcagtaaccgtttaaaaatgacaatcagaaccgttaggaggacatcatgacgcattctgttgtagagcttatcgaaattgaatccgccattattcaggtaaagatgcaagatcgcactcataaaaacgcgttttcacaagaacttacagacggtttaattcaagcgtttgaatacatacggcagaaccccaaatacaaagcggtcattttgacaggatatgataattattttgcttcaggaggaacgcaagaaggactgcttcgaattcaacagggattgaccaagttcactgatgacaatctttattctctggcgctggattgtgagattccagttattgcggcaatgcagggccatggaattggaggcggctttgtcatggggctctttgctgacatagtcattctgagcagagaaagcgtgtatacggctaattttatgaaatacggatttacgcctggaatgggcgctacctttatcgttcctaaaaaactgggtttcagcctgtcccaggaaatattattgaatgcgggcagctaccgcggagctgatcttgaaaaaagaggggttccttttaaggtgctgccccgtgcagaagtgttagattatgcagtggagctggcgcaagaactggcggaaaagccgagaaactcactggttacactgaaagatcatttggttgccccgcttcgcgatcagctgccgcgcgtcattgaacaggaattgatgatgcatgagaaaacatttcatcatgaagaagtcaaaagtagaatcaaaggtttatatggtaattaactgaaaatatataaaattttgcaggtgaaatggaggcagcgtgatgagaaataatgataatatccgcattttagctaatccttctgtcagtcatggtgagcctttacatatatctgaaaagcagccggcaacaatacctgaagttttatacagaacggcggcggagcttggggatacaaagggaatcatttatttgcagccggatggaactgaagtttaccaatcatacagacgattatgggatgatggactgcgcattgcaaaagggcttcgccaatcaggcctgaaagcaaaacaaaacgtgattttgcagcttggtgacaattcacagcttctccctgcgttctgggggtgtgtgttaacaggggttgttccggctccattagccgttccgccaacgtatgctgaatcgagcagcggcactcaaaagctgaaagacgcatggacgcttcttgataagccagcggtgattacggaccgggggatgcatcaggaaatgctcgattgggcaaaagaacaagggcttgaagggttcagggcaattattgtagaggatctgctcagcgctgaagcggacacagattggcatcaatccagtcctgaagacttagcgcttttattgctgacttcaggcagtacgggaacgcccaaagcagttatgcttaatcatcgtaacattatgagcatggtgaaagggattattcaaatgcaaggcttcaccagagaggatattacgtttaactggatgccgtttgaccatgtcggagggatcggaatgctgcatttgcgggatgtttatcttggctgtcaggaaattaacgtctcaagcgaaacgatcttaatggagccgttgaaatggctggattggattgatcattaccgagcttctgttacgtgggcgccgaattttgcgtttggtctggttactgattttgcagaagaaataaaagataggaaatgggatctgtcttcaatgcgatacatgctcaatggcggtgaagcaatggtagccaaggtagggcgcagaatacttgagcttttagaaccacatggactgcctgctgacgccatccgacctgcctggggaatgtccgaaacttcatcgggcgttattttttctcatgaatttacccgggctggaacaagtgatgatgatcattttgttgaaataggctctccaatccccggcttctctatgagaattgtgaatgaccataatgaattggttgaagagggtgagatcggccgttttcaagtctcgggtctttctgttactagcggttattaccagcggcctgatttgaatgagagtgtgtttacagaagacggctggtttgaaaccggagatcttggctttttgcgaaacgggcgcttaaccataacaggccgtacgaaagatgcaattatcattaacggcattaattattacagtcatgcaattgagtctgcagttgaagaattatctgaaattgaaacttcttatactgctgcttgcgctgtccgtctgggccagaattcaacagatcagctggctatcttctttgttacttccgcaaaattaaatgatgagcagatgtctcagcttcttagaaacatacaatcccatgtctcacaggtgatcggagtcaccccggaatatttgctgcctgtacaaaaagaagagattccaaaaacggctatcggaaagatccagcgcacccagctaaaaacttcatttgaaaatggagagttcgaccacttgctacataaacccaatcggatgaacgatgcggtccaggatgaggagatacagcaagcagaccatgtgaaaagagtaagggaagaaatacagaagcatctgctcacctgtttgactgaggagctgcatgtttcccgcgattgggtggagccaaatgcaaatatccaaagtcttggtgtgaattctatcaagatgatgaagctcattcgatcgatcgagaaaaactaccatatcaaactaacagccagagagatacatcaatatcctacaattgaacgcttagccagctatctatcagaacatgatgacctcagcagtttgtctgctgacaaaaagggcacggacacatataaaaccgaaccggaaaggagtcaggcaacttttcagcctctctctgaggttcaaaaaggattatggacattgcaaaaaatgtcacccgaaaaaagtgcatatcacgtacctctctgttttaaattttcgtcagggcttcaccatgaaacattccagcaggcttttggccttgtattgaatcagtacccaatcttaaagcacgtcatccaagagaaagatggagtgccatttcttaaaaatgagccggcactttcaattgaaatcaagacagaaaatatctcaagtttgaaagagtctgatattcctgcttttcttagaaagaaagtaaaggaaccgtatgtaaaggaaaacagcccgttagtgcgtgtcatgagcttttccagatctgaacaagagcattttttattagttgtcattcaccatttgatttttgacggagtttcgtctgtcacatttatacgcagtctgtttgatacctatcagcttcttttaaaaggacagcagccggaaaaagctgtttctcctgccatttatcatgattttgcggcatgggagaaaaacatgcttgccggcaaagacggtgtgaagcaccgtacatactggcagaaacagctatcgggaactttgccgaatcttcagctgcctaatgtcagcgcaagttcagtcgattctcagtttagagaggatacatacagcaggcggctgtccagcggcttcatgaatcaggtcagaacgtttgcgaaagagcattctgtaaatgtcacgacggtattcttaagctgctatatgatgctgcttggccgttacaccggccaaaaggaacagatcgtcggcatgccggccatggtgaggccggaagaaagatttgatgatgccattggacattttctcaatatgctcccgattcggagtgagctgaacccggcagacactttttctagctttatttcaaaattgcaattaacgatattagatgggcttgatcatgcagcatatccttttccaaaaatggtgagggatctgaatattcctcgcagtcaagcaggttcaccggtatttcaaaccgcttttttctatcagaattttcttcaatccggaagctatcaaagcttgctgagccgctatgctgacttcttttctgtcgatttcgttgagtatattcaccaagagggcgaatacgaattagtatttgaactgtgggaaacagaagaaaaaatggagctgaacatcaagtacaatactgggctgtttgatgcggcttctatatccgccatgttcgaccattttgtttatgtaacagagcaggcgatgttgaatccatctcagcctttaaaagagtattctttattacctgaggcagagaagcagatgattctcaaaacatggaacgccacaggaaaaacgtatccatatataacttttcatgagttgtttgagcagcaggcgaaaaagacgcctgatagagcggctgtcagctatgaaggtcaaacattgacgtatcgggagcttgatgagaaaagcacacagctggccatttatttgcaggcgcatggagtgggtcctgaccgtctggcggggatctatgtggatcgatcgctggacatgctagtgggtttattagcgatcctcaaggctgggggagcgtatgtgccgctagacccgtcctatccggctgaacgattagaatacatgcttgaggacagtgaagttttcattacactgacgacatcggaattagtaaatacgttgagttggaacggtgtcacaacagctcttttagatcaagattgggatgaaattgctcaaacagcctctgatcgaaaagtgcttacacgcactgtcacgccggagaacttggcatatgtcatttatacatccggcagcacaggaaagccaaaaggtgtcatgataccgcataaagctttgacaaactttctcgtttcgatgggggaaacaccaggtcttacggcagaggataaaatgcttgctgtcacaacctactgttttgatattgcagctctggaattatttttgcctttaataaagggcgcacactgctatatttgtcaaacggagcatacaaaagacgttgaaaaactgaaacgggacatccgcgcgatcaaaccgacagtgatgcaggcaacccccgctacgtggaagatgctcttttattcaggctgggaaaatgaagagagcgtgaaaattttatgcggtggcgaagcatttcctgagacattaaaacgatatttcttagatacgggcagtgaagcctggaatatgttcgggccaaccgaaacaactatctggtcagcggttcagcgcattagcgatgaatgctctcatgccacgataggaaggccaatcgccaatacacaaatctatattacggattctcagctcgcgccagtgccggcaggtgtcccgggtgagctgtgcattgcaggagacggtgtggcgaagggctactacaaaaaggaagaattaacggattcgagattcattgacaacccttttgagcctgggtctaagctttatagaacgggagacatggcccgctggcttccgggagggcgaattgaatatataggccgcatcgataatcaagtaaaaatccgcggattccgtattgaacttggtgatattgaaagcaggcttagtgagcatcccggcattctggaatgcgttgtggtcgcagatatggataacctagctgcctattatacagctaaacatgcaaatgcttctctcacagcgagagagctgcgtcattttgtgaaaaacgctttgcctgcctatatggtgccttcttattttattcagcttgatcatatgccgttaactccgaacggaaagatagatagaaacagccttaagaatatcgatttatcaggggagcagctaaagcaaaggcagacctctcctaagaacattcaggatactgtttttaccatttggcaggaagtgctgaaaacgagtgacattgaatgggatgacggatttttcgatgtgggcggggattcgcttctcgcggtcactgtggctgatcgcatcaaacatgaactatcctgtgagttttctgtcacagacctgtttgagtattcaaccattaaaaatatcagccagtacatcactgaacagcgaatgggcgatgcaagtgaccatatgccgacagacccggcagctcatatagaagatcagtctaccgagatgagtgatctcccagactattatgacgatagtgtagcgattattggcatatcgtgtgaatttccaggggcaaaaaatcatgatgaattttgggagaacctcagagacggcaaggaaagcatagcgtttttcaataaagaagagcttcagcgctttggcatttcaaaggagatagcggagaatgccgactatgtcccggctaaagcttcaattgaggggaaagacagatttgatccaagcttctttcaaatctctcctaaagacgctgaatttatggaccctcagcttcggatgctgctgactcattcatggaaagcaatagaagatgccggttatgctgcgagacagattccgcaaaccagtgtttttatgtcggcaagcaataattcttatcgcgcgctgctgccgtcagatacaacagagagcctagagacgccggacggctatgtttcgtgggtgcttgcacagagtgggacgatcccgacaatgatttctcataagctcgggctgagagggccaagctatttcgttcatgccaactgctcatcatctctgattggattgcattctgcctataaaagcctcctgtcgggtgaatctgattatgctttagttggcggtgcaacgctgcataccgagtcaaatatcggatatgtgcatcagcctgggctgaacttttcgagtgatggacatattaaagcttttgacgcttcagctgacggaatgataggcggtgagggcgttgctgttgtattgctgaaaaaagcagctgatgctgtaaaggacggggatcatatctatgccttgctgagaggcattggtgtaaataacgacggcgctgacaaagtcggcttttatgctccaagcgttaaaggccaggctgacgtggtccaacaggtcatgaatcaaacgaagatacagcctgaatccatctgctatgtagaagcacacgggaccggaacgaagctgggggacccgatcgagctggcggctttaacaaacgtttacaggcaatatacaaataaaacgcaattttgcggcattgggtcggtgaaaaccaatatcggacatttagatacagccgccggtcttgcgggctgcattaaggttgtgatgagtctttatcatcaagagcttgcaccgagtatcaattataaggagccgaatccaaatacagacttagccagctctcctttttacgtcgtcgatcaaaagaaaacgttaagccgtgagatcaaaacgcacagggctgcacttagctcgttcgggcttggcgggacaaatacccatgccatttttgaacaattcaaaagggattcagataagggaaagatagacggaacctgcatcgtcccgatctcggcgaaaaataaagagaggctgcaagagtatgcagaagacattctggcctatttagaaagaagagggcttgagaacagccagctgcctgattttgcgtatacccttcaggtggggcgcgaagcgatggagcatcgcgttgtctttattgccgatcatgtaaatgagttaaaacagaggctcacagattttatcaatggtaaaacagcgattgaaggctgttttcaaggaagtaagcacaatgcaagagaggtttcatggctgacggaggatgaggacagcgctgaactcatacgtaagtggatggccaaaggaaaagtaaacaagcttgcagaaatgtggagcaagggagcgaatatagattggatgcagctttacaagggtgagcgcccaaacagaatgagtctgccgacttatccatttgcaaaggaacgatactggccgtcgcaggatgaccgcaaaccggtggcgcagatatccggaaatcagacagggatcggctctattcatccattgcttcatcagaatacatctgatttttctgaacagaaattcagttcggttttcactggtgacgaatttttcctgagagaccatgtggtaagaggaaagcctgtgcttcctggtgttgcgtaccttgaaatggcgtacgcggctataaaccaggcggcaggaagtgaaattggccaagatgtcagaatcagattgaatcatacagtctgggttcagcctgttgtggttgacagacattcagctcaagtggatatcagtctcttccctgaagaagatggaaaaatcacctttgacatttacagtacacaggaagacggggacgaccctgttattcatagtcaaggcagtgcggagctggcatctgccgccgaaacgccagtcgcagacctcactgaaatgtcacgccgctgcggcaaaggaaagatgtcgcctgatcaattttacgaagaaggcagaagcagaggaatgttccatggtccggcctttcaaggaattaagaatgtgaatataggaaacagagaggttttggcgcagctgcagcttccggaaatcgtttctggaacgaatgaacagtttgtgctgcacccaagtatcatggactccgccttgcagacagcaacaatatgcatcatgcaggaattgacggatcaaaagctgattttgccatttgcgcttgaggagcttgaggtgatcaaagggtgttcttcttctatgtgggcttatgctcgcttaagtgacagcgatcactccggaggggttgttcagaaagcggatatcgatgtcattgacgagagtggaagcgtatgtgtcaggatcaaaggattctcaacgagagtattagaaggggaggttcatacttcaaagccttcaacacggtacgaacgcttaatgcttgaaccggtgtgggaaaaacagaatgaagaacgagaggacgaagatccttcgtacacggagcatatcattgttctcttcgaaactgaacgaagtgtcacagacagcattgcctcccacatgaaagatgtccgtgtgattactctaaacgaagctgaaggacatattgctgaacgttatcaatgttacatgcagaacatttttgaactcctgcaaagcaaggtccgtgaactttctgcaggccgtatcatcattcaagcgattgttccgctggaaaaagagaagcaattgtttgccggcgtttccggtctgtttaaaacagcagaaatagagttcagcaaactgactgctcaggtcatcgaaattgagaaacctgaagagatgatagaccttcacctcaagctgaaagacgacagccagagaccatttgacaaacagattcgatatgaggctggacaccgttttgtgaaaggctggagggaaatggtgcttccttcagctgatatgcttcacatgccgtggagagacgaaggcgtttatctaatcacaggcggagcaggaagcttaggccttctgtttgcaaaggaaattgccaatcgaactggccggtctactattgtgctgacgggacgatctgttttaagtgaggataaggaaaacgagctggaggctcttcgaagcatcggagcggaggttgtctatcgggaggctgatgtaagtgatcagcatgcggttcgtcatcttttggaggaaatcaaagaaagatatggcactctcaatggaattattcacggtgcaggcagcattaaagatcgcttcatcattcataaaacgaatgaagagtttcaagaagtgttgcagccaaaagtgagcgggttgttacatgtagacgaatgcagcaaggatttcccattggactttttcattttcttctcttctctttcgggatgtttaggaaacgctggacaagccgattatgcggcagccaattcgtttatggatgcatttgctgaataccgccgttctcttgcggcatcaaaaaagagattcggctccaccatttccttcaattggccgttatgggaagaaggcggtatgcaagtcggcgctgaagatgaaaagagaatgctgaaaacgacgggaatggtcccgatgccgacagatagtggcttgaaagcattttatcaagggatagtatctgataagccgcaagtttttgtgatggaaggacagcttcagaaaatgaagcaaaaactgctttccgcaggatcgaaagccaagcggaacgatcagagaaaggcggatcaggatcaaggacaaactagaaaattggaagcagccttaatccaaatgattggcgcaattttgaaagtaaacactgacgatatcgatgtcaacacagagctgagtgagtacggattcgactcagttacattcactgtctttacaaacaagatcaacgaaaaatttcagttggagctaacaccgaccattttctttgaatatggtagcgtccaaagcctggctgaatatgtagttgctgcgtatcagggcgaatggaatcaagatgctactgctaaaggcaaagatgaaagaacaaacttagtgcacagtttaagcagcctggaggcatcattaagcaacatggtcagtgcaattttaaaagtaaatagtgaagatattgatgtcaatacagagctgagtgaatacggatttgattccgttacatttacggtctttacaaacaagattaacgaagaatttcagttggagctaacgccgaccattttctttgaatatggaagtatccaaagcctggctgagtatttgactgctgaacatgaggacaccctggttcaggagcgcgaaaaaccagaggggcaggaagagttacagacaaaatcccctgaagcgccgaaaatcacatcacgtagaaagcgccgctttacacagcctgttattgcaaaagcagaaagaaacaaaaagcaggctgccgattttgagccggttgcaatagtcggcatcagcggccgattccctggcgctatggatatagatgaattttgggaaaacctagaagaagggaaagacagcatcacagaagttccaaaagatcgatgggattggcgggagcattatggaaacccagacactgacgtcaataaaaccgacatcaaatggggcggatttattgacggtgtcgctgagtttgatccgttgttttttggtatttcgccgcgagaagctgattatgtagaccctcagcagcgcttgttaatgacatacgtgtggaaggcactggaagatgcgggttgctcgccgcaaagcctttcgggtacagggaccggtatctttatcggtacgggaaacaccggttataaagatctattccatagagcgaatcttccaattgaaggccatgctgctacaggtcatatgattccttcggtaggcccgaatagaatgagttattttttaaatattcatggtccgagcgaaccagtagagacggcctgttccagttctcttgtagccattcaccgtgctgtgactgcgatgcaaaacggtgattgtgagatggcgatcgctggaggcgtgaatacgatcttaaccgaggaggcgcatattagctacagcaaggcgggtatgctcagcaaagacggcaggtgtaaaaccttctccgccgatgcgaatggctatgccagaggcgaaggggtcggaatggtcatgttgaaaaagctggaagatgccgagcgcgacggaaatcatatttatggcgttattcggggcacggcggaaaatcacggcggaagagccaataccctgacatcgcctaatccgaaagcacaagctgatttgttggtgcgtgcatatcgccaagcaggcatagatccaagcactgtcacatatatcgaagcacatggaacagggacggaattgggcgatccgattgaaataaatgggctgaaagccgcgtttaaggaactatccaatatgaaaggcgagagccagccggatgttccggatcaccgttgcggcatcggctcagttaaaagcaatatcggtcatttagagctagcagccggtatttccggtttgatcaaagtgcttttgcaaatgaagcataaaacgttagtgaaaagcctgcattgcgagacgcttaatccttatcttcagctgacagacagtccgttttacatcgttcaggaaaaacaggaatggaagtctgtcacagatcgtgacggaaacgagcttccgcgccgtgccggaatcagttcgtttgggattggcggagtaaacgcgcatattgtggttgaagaatatatgccaaaagccaattcagaacacacggctacaggacagccaaacgtgattgtgctgtcggctaaaaataaaagcaggctgatagatcgtgctttgcaattgcttgaggcgatccgcaataaaaaatatacagatcaggagttgcaccgcatcgcttacaccctgcaggtcgggcgcgaagaaatggatgagcgtctggcgtgtgttgcggggacaatgcaggaacttgaagagaaactgcaggcgtttgttgacggtaaggaagaaacaggcgaatttttccggggacagtctcatcgaaataaagagacccagactatatttacagcagatgaagatatagcgttggcacttgatgcttggatcagaaaaagaaaatacgccaaacttgctgatttatgggtcaaaggggtctcaatccagtggaacacattatacggagagaccaaaccgcgcctgatcagcctcccttcatatccgtttgcgaaggatcactattgggtgccgacaaaggaacattcagaaagagacaaaaaagaactggttaatgcgattgaagatcgggctgcatgctttttgacgaaacaatggagtttgagtccaattggctcagcagtgccggggacaagaactgttgccatcctgagcaatcaagagacagcagatttagcagcagaagtgtcttcgtattttccgaatcatctcttattagatgtgagccggatagaaaatgatcagtcagacattgattggaaagagtttgacggcctagtggatgtcatcggatgcggtaaggatgatgagggccggctggattggattgaatgggtgcaaagactggttgaattcgggcataaagaggggctcaggctgctttgtgtgacgaaggggctcgaatcgtttcaaaacacatctatccggatggctggcgcctcacgggctgggttgtatcgaatgctccaatgcgagtacagccatcttatatcaaggcatatggatgcagaggaggttactgatcatcgccgtctcgcgaagttgatcgctgatgagttttattccgattcttatgatgcggaggtttgctacagggatggtttacggtatcaagcttttctaaaagctcatccggaaacaggtaaggccacggaacagagcgcggtcttcccgaaagatcatgtgcttctcattacaggcggcacacgaggcatcggactattatgcgcccgtcattttgcagagtgctatggagtgaaaaaactggtgctgaccggacgagaacagtttcctccgcgagaggaatggactcgttttgacacctcgaacacatcagttgcccagaaaatccaggcagtgcgggagctggaagcgaagggtgtacaggtggagatgctgccgctgacgttatctgatgatgctcaggttgagcaaacgttgcaacatatcaagcgaacattaggaccgattggcggtgtcattcattgtgcaggtctgacggatatggatacgctggcatttatccgaaaaacttcagatgatattcagcgggtgctggaacctaaggtgtcaggtcttacaacgttatatcgccatgtgtgtaacgagcctttacagttttttgtcttattttcttctgtttcagccattattccggagctttcggcgggacaagctgactatgctatggccaatagctatatggattattttgcagaagcacatcagaaacatgcgccgatcatcagtgttcagtggccgaactggaaagaaaccggtatgggtgaagtgacaaatcaagcgtatcgggaaagcggcttgttgagcattacgaattcagaaggcttacgttttctagatcaaattttatcgaaaatgttcggaccggttgttctccctgcgatggcgaatcaaacaaactgggagccggaactgctgatgaagaggaggaaaccgcatgagggcggtttgcaggaagctgctttacagagcccgccagctagagacattgaagaggccgatgaagtttccaaatgtgatgggttattatctgaaacacagtcctggcttgttgatctgtttaccgaagagctgagaatagatcgtgaagacttcgagattgacggggtgtttcaggattatggcgtggattcgatcattttggcacaagtgctccagcgtataaaccgcaaattagaagcagcactcgatccatcgattctatatgaatacccgacaattcaaaggttcgcagattggctgatcggttcttattccgaaaggctgtccgctttattcggaggcaggatatcggatgcatcagcacctttggagaacataatattggcggaggcagctgttcctgcggaggatcgagctcttacacctcagattcaggcgccagcgattttgtcaccggactctcatgcagaaggtattgccgttgtcggactctcttgccgattccctggggcagatacattggagtcatattggtcgttactatccgaggggcgttcgtcaatcggcccgattccggcagagcgttggggctgtaagacgccatattatgccggcgtgattgatgacgtcagctattttgatcctgatttctttttgcttcatgaagaagacgtaagggcgatggatccgcaagcactgctcgtattggaagagtgtctgaaactcttgtatcacgccggttatacgcctgaggaaataaagggaaagcctgtcggtgtttatatcggaggcagaagccagcacgaacctgatgaagagagccttgatcatgccaagaatccgatcgtgacagtcggccaaaattatttagcggctaatctttcacaattttttgatgtccgcggcccgagtgttgtagttgacaccgcatgctcgtcagctttggtcggcatgaatatggccattcaggcgctgcgtggcggagatattcaatccgccatagtcggcggtgtcagcttgctgagctcagatgcctctcacaggctgtttgaccggcgcggcattttaagcaagcattcatccttccatgtgtttgatgagcgtgctgacggagttgtgttaggtgaaggcgtcggaatggtcatgctaaaaacggtaaaacaggcgctggaagacggagataccatatatgctgttgtgaaagcggcctcggtcaataatgacggaagaacggcggggcctgcaacacctaatctggaggcgcaaaaggaagtcatgaaagatgcgctttccaaaagcggaaaaaaaccagaggacatcagctatcttgaggcaaacgggtcaggttcaatcgtaaccgatctccttgagctaaaagcgatccaatcagtgtaccgttctgggcactcatcgcctctttctcttggctcaatcaagccgaacatcgggcatccgctatgtgctgaagggatcgccagcttcattaaggttgtgctgatgctgaaagagcgccgctttgtcccatttttatcaggtgaaaaagagatggcgcatttcgatcaacagaaagcgaacatcacgttcagccgagccctggaaaaatggacagattcgcagcctactgcggctattaactgctttgccgatggggggacgaatgcccatgtcatcgtagaggcgtgggaaaaagatgaaaaacacgccatcaagcgcagtccaatatcgcctcctcaattaaagaaacgaatgctttcgccaggcgagacaaagctggaagcggagacttcgaaaatgactgcggcaaacatatgggatacttatgaggtggaggtctaacgtgaaaaagataacgaaacaactcacattatcgttaaaaaatccgtttatttatcaccatgtggtttacggacaaaatgtcctgccgggattggcttatatcgatataatctaccagatattcagagaacacggcttctcctgctcagagcttcagctgcggaatttatccatctatcagccattgacggcggaacaggatgcagtaattgttctgaatatccaatgcgcggagaaaaaagaaggacagtggcaaatcacagccaagggaactgaaaaacgtgatgggaaagaagcttcagaagaaaagctctatatgaaggctgatatgtacgcagactccccagccatatttgaagaaacactggatctcagtcaaatcaaagcatctgcacagaacgttgttcagcttgatgatgtatatgaacaatgcagacgtcaggaattggtgcacagcgaatatatgaaagcaaaaggctgcatctatgaagaggaagatggcgtccttcttgagctttctctcggttcggaagccatgcttcacgcagaaggctttatgtttcacccgactctcatagacgggagcggggtgggtgccaatcatttgctcacatctttgcttaaaggagaacagaggctgtatttgcctctgttctatgaatccttttccgcttctgcacttttgcagtcgaattgcatgacgagaattaagcgctcctccgtccggcgggaaaaagagctgatttatgtaacacttgaattttttaatgcgtcgggagaaaaagtggctgagttgaaaaactttacaagcaaattggtgcgagaagcggagctgattagcggaaaacatcaagatgcacaggagacacagatgacaagagcggacactgctgagcgtgataaacctgctgacatggtatcttctcccgttaattcctatagtgaggctgaacagttcgtaagccaattaatcgcagagaaaatcaataagccggtagaacaagttgaaaaacaggtcggttattaccaaatgggactgaattcatcgggcttgcttgaggtggtagaaacgatcagtgataagatcggtgagagcctttcgccgactcttctgtttgagcataccaccatagcggaactgtcagcgtttcttgccgaggaatatgctgagcattttagtgccgctggttcccttggccttggccagaatgaaagagcacgcgtttccgacagcataaacgaccgtaagactgttgaagcttctcgtcctgcacctattgaggcagcaggcgatattgcgattatcggcttggcgggcaggtatccgaaggcagccaatattcatgaattttggaacaatctgaaagaggggaaggactgcgttagcgagattcctgagtcgcgctgggattggcagaaacttgaaggaatcacatctccttcgggtaaggacatttccaaatggggaggatttattgatgatcccgactgctttgatccccaatttttcagaatcacgccaagagaagcggagacaatggaccctcaagagcggctgtttttagaaacatgctgggaaacgattgaggatgcgggctatacgccaaagacgttggccaagcctaaaggacgaaataaaaggcagcatgtaggagtttttgccggtgtcatgcacaaggattatacattagtcggagctgaagaagcatcagcagaaaatgtgtttcctctttcgctcaactatgcgcaaatcgccaaccgtgtttcttacttttgtaatttccacggtccaagtatggctgtcgatacggtatgttcatcctctttgaccgcagtgcacttggcgttggaaagcatacgtcacggtgagtgcgatgttgcgttagcaggcggagtgaacctgtctttgcacccgaataaatatatgacatacggggtctgggatatgttttccactgacggacactgccgtacgtttggaaaggatggagacggttatgtgcctgcagagggtataggcgcggttttattaaagcctttgcgccaggcagaggaagacggagatcgcatttatgcagttattaaaggaagtgctgtgaatcatgtgggcactgtaagcggcatttcagtgccgagccctgtttcccaagctgatctgattgagacatgcttggagaaaacgggaatcgatccgcggacgatcagttatgtggaagcccatggaaccggcacgtccttaggagatccgatcgaaatacagggattagtgaaagcgttccgccaatatacgcaggatcggcagttctgttcaatcggttctgtaaagtcaaacattgggcacgccgaatccgccgcggggatcagcggtttaagcaaggttgctcttcagcttcaccatcaaaaacttgtgccttctttgcattcggaagaactgaatccgtacgttgattttgaaaagtctccattttatgtacagcatgaaacagaaacgtggaagcagcctgttatcaaggagaatggggaagacgtcccttatccgcgacgggcggggatcagttcttttggcgcaacaggttcaaacgcacatattatccttgaggaacatattcctcaagcagcggagcaggacgtttctttgtcctcagattctgacatatccgcagttattccgctttctgcccgtaatcaagaacgtctccgtgtatatgcaaaacgtctcttggattttcttcatgatgggattcagattagagatttggcgtatacattgcaggtaggccgtgaaccgatggaagaacgggtttctttcttagcatccggaattcaagaattgagcgaccaattgaaggcttttatagaaggacgaaaagccattcagcattgctggaagggccgcgtgtcaagaggaagcgaaccatcgcgtcccgccgaatcggtacataaattgctggagcaaagaaaactcgatcagattgcggagcagtgggcgaacggatctggtgttgactggaagctgctttacgagggaagcaaaccaaagcggatcagcctgccgacttacccatttgagagggtgcgttattgggtgccgaaagcggagaaaaagactgatcgttcaaaacaggagcggcacatcctgcatcctcttctgcatcaaaatgtgtccgacatatcgggtgtccgcttccgttcagcgtttacaggacgtgaatttttcttgaaggatcatgtcataaagggcgaacacgttttacctggcgcagctttattggagatggttcgggcagctgtggaaagggcagctgcggatcagttcccgacaggattccggctccggaatatcgtctgggtccggccgttcgccgtcacggaacagcagaaagatatagatgtacgtctatatcctgaggaaaatggtgagattacatttgaaatctgccgggaccctgaaagcgcagaggagtcgccgattgtatatgggcaagggagtgcagtgctttgtgaggctggtgaaaatccggttatcaacattgaagaattgaaggcaagctataatggccggacgctgtcaccttttgattgctacgaggcttatacagaaatgggtattcattatggtgacagccacagagcgatcgacagcctatatgccggcgaaaacggagttctagtgaaattgacgatgcctcctgtaatctctgatacagaagaccattatattctgcatccgagcatgatagattcggcatttcaagcatctatcggtttgaggctgggaggagctacgagtttagaagacagaaaggcaatgctgccttttgccatacaggatgtccaaatcttcaaaggctgcgaggcatctatgtgggcgcggatcacatatagcgagggcagtacagctggggatcgtatgcagaagcttgatatcgatttatgcaatgaagaggggcaggtttgcgtgcgattgacgggctattctgcaagagtgttagaaacaggtcaagaagatccttctgaagcgactgacacgctattgttcgaacatatttgggaagaacgtgctgcagagaggaaagagctcatagagtacgacacacataaagtcgttatctgtgatgttggagaacaaatggaaagcctccaaaatcatcttgactgtacagttctgcagcatgatacagagacaattgatgaacggtttgaaggttatgccatacagttatttgaagaaatcaaacagctaatgcactcaaaaacagggggacatacattcattcaagtggcggtgcctgcgttggacgagcctcagctattaagcggcttaactggattgctcaaaacggctgaactggaaaatccaaaactgacaggacagttgatcgaaatagagaccgggatgtcagctggtgacctattcgaaatattggaggaaaacagacgctatccgcgtgacacgcatatccgtcactggcaagggaagcgatttgtaagcaagtggaaagaagtgtctggtgagcacctaagagctgatatgccatggaaggataaaggcgtgtatctgatcacaggcggtgcaggcggtcttggattcatctttgcaactgaaattgcgaaccaaacgaatgacgcggttgtgatcctgacaggacgctctccgcttgatgaaaggaagaagaagaagcttcaagccttacagaaacttggcatccaagcgatttacagacaagctgatctggctgacaaacaagcggttgatgccttattaaaagaaacccaaaacgtttacggagacttagatggcatcattcatagcgccggtttaataaaagataatttcattatgaagaaaaagaaagaagaggttcaaaccgttcttgctccaaaggtcacaggactggttcaccttgacgaagcaacgaaagatattccgctcgatttctttatccttttttcctcaggtgccggagcagtaggaagcgcgggacaggctgattacgcaatggccaatgcatttatgaatgcatttagcgaatatcgtaatggccaagcagagctgcacaagcgttacggaaaaactctttcagtgtgctggccgctgtggaaagacgggggcatgcaaattgatgcggaaactgcaaggatgctgaaaagagaaacaggcatggtggccatggaaacagatcgtgggattcaggcgctatatcatggctggacgtcagggaacccgcaagtgttagttgcttccggtgttactgatcggattcgtgcatttttacatgaaacgggacatggcaaaggccaatctcacaatatcaaaaaaagcagtctcaatcaggaggcagaaaaagcagacatcattggggaaattgatgaagagatactaagagaaaaagcggagaactattttaaacaggtgctttcttcggtgattaagctgccagctggccagattgatgctgaagctcctctcgaggattacgggatcgattctatcatgatcatgcatgtaacgggtcaattagaaaaagtattcggatctttgtccaagacgctgttctttgaataccaggatattcggtcattaacccggtattttattgattcccgcagagaaaaactgctggacatcttgggatttgaaacgggaaaaccttctgttgaaagaaaatcagaacctgaaaaacaagaaatcccagttatcccaagaaagtctggatttcttcctttgcaagataaagagcagaagcaggtaagagagaaggaaacggaagaaattgcgatcatcggtatctcaggtcgctatccgcaggcagacaacattgatgaattatgggaaaacctgagggacgggcgagactgtattacggaaattcctgcagaccgctgggatcacagtctttattatgacgaagataaagacaagcctggaaaaacctacagcaagtggggcggcttcatgaaggatgtagacaagtttgacccgcagtttttccatatttcgccgcgtgaggcaaaattaatggacccgcaagagcgtttatttttgcagtgcgtgtatgaaacgatggaagacgcaggctatacaagggagcatctcggccgtaagcgtgattcggagcttggcggaagcgtcggtgtttacgtcggtgtcatgtacgaagaatatcagctgtacggggcacaagagcaggtgcggggaaggtctctggctttaacgggaaatccatcatccatcgcgaaccgagtatcttattattttgattttcacggaccgagtattgctttagacaccatgtgttcttcttctttaacggctatccacttggcctgccaaagcctgcagcgcggagagtgtgaggcggcattcgcgggcggcgtgaatgtgtcaatccatccaaataaatatttgatgctcgggcagaacaaatttatgtccagcaaaggccgatgtgaaagcttcggacagggcggagacggctatgtgccgggggaaggcgttggagcagtgcttctgaagccattgtctaaagcagttgaagatggtgatcacatttatggaatcattaaggggacagccattaaccacgggggaaaaacaaacgggtactcagttcccaatccgaatgcccaagcagatgtcatcaaaaaggcgtttgtggaagcgaaggttgacccgtgggcagtcagttacatcgaagcccacggcacgggaacctctctcggtgatcctattgaaatcacagggctgtccaaagtgtttacgcaagaaaccgatgacaaacaattttgtgcaatagggtcagccaaatcaaatatcgggcactgtgagagtgcggcaggtatcgcaggagtaacgaaggtattgctccaaatgaaatacaggcagcttgcgccttccctgcattcaaacgtgctgaacccgaatattgatttccttaactcgccgtttaaagtacagcaagagctagaagagtggaagaggccgatcatcagtgtcaatggcaaagacatcgaattaccgagaatcgcaggagtctcttcatttggtgccgggggtgtgaacgcccatattttaatagaagagtatgattcggaacctgtggaggagcgtttaccagcgaggaaacagccggctgtcattgtgctctcagcaaaaaatgaggaaagacttcagaaacgcgcggagcgattgctgcataccattcgtgaacaaacatatgttgaagcagatttacaccgaattgcctatacgcttcaagtcggacgggaagcgatgaacgaacggctggcgttcgttgcggaatcgatgcgggagcttgaagaaaagctgaatgaatgtatctccggaacagaaaatcgtgaatatgtctatcgcggacaagtaaagcgcaacaaagaagccattgctgcttttgctgctgatgaggatatgtcaaaaacaattgaggcatggctgcaaaaaggcaaatatgcgaaggttttagacctatgggtaagaggtttgcgcatcgactggagcacgctatatcaggatcaaaaaccgcagcgcatcagtttacctgtctatcctttcgcaagagatcgctattggatagacgtacatgcaatggctgaggaaaaaagaacggaggagccattcgctccggtacagcccgtccttccaaagccgtctgtagccagagaagccagcggcaagcctgccaatattacgttacagcctttaatgaccaatcaggatcgtttagagcgttttccatcagatacagaaacagagacgatcacggcggaagccttgtgcgatgaactgacagcgggcttagcggaagtgctgtacatggaccaaaacgagattgatccagacgaagctttcatagatatcggtatggactcgattaccgggctcgaatggataaaagcaataaataaacagtatggcacatcactaaatgtcacaaaggtatatgattatccgacaacacgtgatttcgctgtttacttagcacacgagttaagcacacaggctggggagaaaaaacaaacggagacgtacacgccgatcagacaaaaaacagcggtacctgctgctaaaccggctaatatatctctgcagccgttagaacatcatcagccagtgcaagaggagggtgaagaaacgattcaatatgcagcggcagaaatatctgcatcaagacaatatactgtagcaattgaaacgctgcatgaaaacttgagggaaagcatagcagacgtgttatacatggagccatacgaggtggatattgacgaagcgttcatagatatcggaatggactcgattaccggactcgaatggataaaagcggtgaacaagcaatacggaacgtcttttacggtaaccagggtatatgattatccaacgatacgtgattttgccgaaatgctaaagtccgagcttggaactcatcatgatagagaggtagagcatactgttcctatcgaagcagtccagcaaaagccagcagcaccatctaatccaaagccggcagaacggccccttcagcctgttcaacatccaataaagaaagaacatgagaagaaaacggtacctgttcatcaagactacccggaggatgcgatagcgattgtcgggatgtcgggaagatacccgggcgctcgtaatgtaagagagtactgggataacctggttcatgcgagaaatgctattcgggacattccaacatcacggtgggatgttgacaaatactatgatcctgtcctcaacaaaaaaggaaaagtctattgcaaatcaatggggatgcttgatgatattgaacattttgatccgttgttttttaatattccgccgtcagaagctgaactgatggacccgcagcatcgaatctttttgcaggaaggctataaagcctttgaggacgctgggtacaacgcccgaactttaaatgagaaaaaatgcggtgtatatctcggcattatgagcaatgaatacggggtcatgctgaaccggcaggcaagagcaaatgccaccgggaacagctttgcgatcgctgcggcgcgtattccatattttcttaatttaaaagggcctgcgattcctattgacaccgcttgttcatcttcattggtcggcacacatttagcgcggcaggcacttataaacaaagaaattgatatggcgctggtcggcggggtcagcttatacctgacgccggaatcttacatcagtatgtgtgaggccggcatgctttcacctgatggacaatgtaaagcatttgacaatggcgcgaatggttttgtgcccggcgagggtgcgggtgcgctggttctgaaaaggctgaaagatgcagaagcggaccgtgaccatatttatggcatcatcattggctcgggtattaatcaggacgggaaaacaaacggaatcacggcaccgagtgcaaaaagccaaatggacctggaaagagacatatatgaaacatacggcatacatcctgagagtatcagttatgtcgagatgcatggcacaggaacaaaacaaggcgatccaattgaattagaagctctgtccaccgtatttcaagaaaaaacagacaaaaagcagttttgcgcaatcggttccgtcaaaagcaatattggccatacatccgcggcggcaggagtagccggggttcaaaaagtgttattatgtatgaatcataaaacacttgtgccgacattgaacttcacgacaccgaatgagcattttgaatttgagcattctcctttatacgtaaatacggagcttaagccttgggaaacgggtgatggaaaaccgcggagagcatgtgtgagctctttcggatatagcggaacgaatgcccatatcgtgatagaggaatatcagcctgaaaagaggagcgatccattaacaaagcagcaccgctcagcattatttgtactttcagcgaaaaaagagaagcaattgaaggcctatgcggaagcaatgaaagatttcgtaacttccaatgaagatatcgatctggaggatatggcatacacacttcagacgggccgggaagcaatggattatcgcatggcgtttttggcggattcgagagaaatgctgatcaaagctttagatgattatttggctgaaatgccgaacggcagcatatttgctgctcacgtgaaaacgaagaagagcgaaatcaagctgtttgaaacggatcatgatgccaaagcattgctgcaaacatggatagagaaaaaaaggctggagaaagtagcagagctatgggtgaaagggctgcagatagattggaacaagctttatggggaatacacgcctcgccgaatcagcctgcctgcttatccgttcgcggaagagtattactggctgccaactcaagaaggcgaacccgaaaccattgctacagcaatgcctcaattcgaactgatgccaaagcgctgctttctgcgtaaacagtggcagccttgtccgattgaaccggcagaaatgacgaatcaaaccgtcgccattttggcaaatgaggagacaatggcattagcggaagagctttcgacgtatttctcgacataccgtatatttgacagccaagagctggatcgggtatctgctgctgactatgaacacgttgctggagcaatcgatctgatcgggtgcggaacgagccatgagcattctatgggctggataaactggctccaaaagctgatcgagcaaggacgtgcaagcaagcatcatttgacggtcttgggtgtaacaaaggggctggaggcctacgcaaatgagggtgttattttgtctggtgcttcacgggccggtttataccgcatgcttcaaagtgagtacagccatcttacttcaagacatgcagatatggaatgcgaagcctctcatgaggagctggccagactgattgcagttgaatattatgccaagagcacagaatcagaagtctgttatcgaaacggacagcgatatcgcgcatatttgacagagcagccagcagaagccgctctaagtcataagcaagtatcgttttcaacagacaaagtcctgctcattacaggcgggacaagaggtctcggcttgctgtgtgcgcggcattttgtgaaaacatacggcgttaagcggctggtccttatcggccgtgaagagcttccaccgcgtgaccagtggaatttggtaaaaatttcctcgcttgccgagaaaataaaagccgttcaagagctagaagacatgggtgcgcaagttcaggtgctgtctctggatctcacagacagggttgctgtcgaacagagcctgaagacaatacacgaaacaatgggggcgattggcggagtcatccattgtgccgggatggtgaacaaacaaaacccggcttttatcagaaaatcactagaagagatcggacaggtttttgaaccgaaagtcgaaggtctgcaaacgttgtttgacctgcttcaagatgaaccattggcgtttttcaccttgttttcatcagtatcagcggccatccctgcactagcagcaggacaagctgattacgcgatggcaaatgcttttatggattattttgcggaggctcatcaagataaatgtcccattgtaagcattcagtggcctaactggaaggagaccggtttaggcgaggttcgaagcaaagctttagaacaaactggattgatcagtttgacaaacgacgagggattacagctgcttgaccagattctatcagacagacagtatgctgtcgtgctgccggcagtaccagatacaaacgtttggaagccggataagctgatgcagccgtcattgcctgtcgaagctctctcgcatcctgagacgaaagagcaaaccggcactcgcaacctgttccctgaaacagtcgactggctcgtaactcttttttcagatgaactgaaaatagctgcagaagactttgaaacggatgaacctttccaagaatacggaatcgactcgattatattggcccagctggtacagcagatgaaccaacaattaaatggagatattgatccgtcaatcttgtttgaatacccgacaatagaatcctttgcacactggctcatttcgaaatatgacatatcagctgttttacagccatctgttcctgagaaacagacacctctcaagccgcaatcagcaatgaaacagaagctggtgccagaacagcggccgcaacagataagccatgaaaaaacggcacttcttgctgaggacatcgctatcatcggtcttagttgcaggttcccgggagcggaaaccctagaggaatactgggatttaatacgtgatggacggtctgcgattgcgcctgttccgcctgaacgattcgggaactccagctcgaattacgcgggcctcattgatgaaatgaaccgatttgatcatgatttcttcatgatgtccgaaagcgatgtcagagcgatggaccctcaagctttggctgtattggaggaaagcttgaagctatggtatcacgcgggttatacagagaaagaagtgaaaggcatgagggctggtgtttatataggaggccgcagccagcacaagcctgatccggccagtctttcaaaagcaaaaaatccgatagtcgctggtggacaaaactatttagcggctaacatctcacaattttttgacttgaagggaccgagtattgtcctggataccgcttgttcctctgcactggtggggctgaatatggccattcaggctctgcgaagcggagatattgaggcagcggttgtaggcggcgtcagtttgcttgatgctgatgcgcatcgaatgtttcatgagcgcggacttttatgtgacaaaccgtcattccatatttttgataagcgggcagacggtgtcattttaggagaaggcgtgggcatggttctcgtcaaaaccgtcagccaagcggttgaagacggagattccatatatgcagtcattaaagccgctgcgattaataatgacggaagaacggcaggcccatcatctccgaatctcgaggcacaaaaggacgtcatgctgtcagcgcttgaaaaaagcggcaaaaagactgaagagatcagctatctcgaagcgaacggatcggggtcggcagtaacagatttacttgaattaaaggcaatccagtccatttaccgttctgaatcaaaggctccgttagggctgggatcggtgaaacctaacatcggccatccattatgtgcagaggggattgcgagcctgattaaagtagctttaatgctgaagcatagacaattggttccgttcctgtcaggtaatgaaaatatgccgtattttgatatagaaaaaacagatttgtatttcagcagatcgcaagccgagtggaaggagacaacgccggctgcggcaattaattgttttgcagatggcggaacgaacgcccatctcattatagaagcctggaatgaatcggttgctcgtccaattagaagaaaacctctgcctttgccggaattaaataggcagcccgttttaatcaaaccatcagctcaaaacgtgcaggaaaaagtgcattcagacacaggggcttctaaagatatgttttggaaaactttcaaataagagaggagtgggaaaatgataactgaacaactgcacatttcattaaataatccaatcatgtccaaccacaaggtatatggacaagcgttattacccggccttgcttatatagatttgatctaccaagtattccaggaacatggttatgtataccaagagcttgaattaaaaaacctgaccattttttaccctttgatcgcagatgagtcatatgacattgccctgaccattcacgtgtctgaaagaaaggaagggacatggtccatcatcatcgacggacaaaaacagcatggagaatcactatctgacaagagacaatatgtgactgctgacatgcatcgtaaagagcaaaccgcttttgccgaatcaatagaccttaatcagtggaaaagtacagctgacaggattctgaatttagatgaaatctatgaacaatgccgatctcaagagttagtgcataccggcatgatgaaggcggaaggacagatttatgaagccaaagagggggctgtaattgatttagcagtcggacaggaagcattgcgtcattctgatgcttttctgtttcatccgacgcttattgacggcagcggcataggttcaagctgcctgatctcagatcaaacgatgtacctgccattgtattatgaatcgttttctgcttcagaacgattgcaaaaaggatgtacagcacggatcctctcctcatctgtgcgccaaaagaaagagctcacttatatgacgattgaatattttaattcatcaggacaaaaagtggccgagctgaaacaatttgcaggcaagtctgtacggaatatgtcagcctttcattctccaaaagaaattcaagaagaaagagctgctgtctctcagaacatcagtcaggactatcccgcatttgaaatgtatttgcgtcagctgcttgctaagcagcttgaaaggccggcagaacaaatggatatccacgctgggtactatgagcttggtctggattctccgtcattgcttaccgtggttcaggaaattggagataaggttggagcggatcttgctccgacactgctgtttgaatttacaacaattgcagaactagctgctcatcttgctgatcactattcaattggagaggcggacgatgctgtccgccaatctccttcaccaatgaaggattctcctgatggtgttacctcttcaccagagatcggggaggacattgccattatcggaatggcgggacgctatcctaaggcaaaaaacatacaggaattttgggaacatcttaaagcgggtaccgactgcatcacagagattccaaactcacgctgggagtggaaagaaaacaatggacaggattcacctgcaggcaagccactctcgaaatggggcgggtttatcgaggaggctgattgctttgatcctcaatttttcagaatctctccgcgtgaagcggaaatgatggaccctcaggaacggttatttttagagacatgctgggaagctattgaagatgcgggttatacaccagagacaattgcttcaccgcagggagaaaataaaagacagcatgtcggtgtgtttgccggcgtaatgcataaggactattcccttataggggctgaagctctatcagaacacaatccatttcctttatcgctgaattatgcgcaaatcgccaacagggtctcttactattgtaatttccacggcccaagcatggcggtggacacggtctgctcttcctcattaactgcggttcatctggcaatagagagcatccggaatggagaatgcgaggccgcgcttgccggaggcgtcaatttgtcattgcatccggctaaatatatcagctatggcagtgtaggaatgcactcaagtgacggctattgccatactttcggcaaagacggagatggctacgtatctggagaaggtgtcgggacagtattgctaaaaccgctgcgaaaagctgaacaggacggtgaccgaatctatgctgtcatcaaaggaagtgcgataaatcatgtaggaaaagtaagcggaattacagtaccgagcccggtagctcaagctgatgttatcgaagcgtgtctagaaaaaacaggaattgatccgcgcaccatcagctatgttgaagcccatggcactggcacctcattgggagatccgattgaaatacaggggttagtaaaagctttcagccgcaatacgcaggacaagcaattctgttcaatcggttctgttaaatcgaatattggccatgctgaagctgcagccggcattagcggcttaacgaagactgtcctgcagctgcatcataaaaccttggtgccgtcattacattcagaagagctgaatccttatttgaagcttgatcaaaccccattttttgtccagcatgaaacaaaggaatgggggcagccatcttttacagaaaacggggtggacgtcacatatccccgccgtgccggtttaagttcgtttggcgcttcaggatcaaatgcgcatcttattttggaagaatatattccggccgagagccattcagaaacgattttaacgaaaaatgaaggaatagtgatacctttgtctgcgagaaacaaagatcgtctgcaggcttacgctcttaaacttcttgattttcttagcgaggacgtcaatcttttagcgttagcttataccatgcaggcagggcgggttgaaatggaggagcgtgcggccttcatcgtaaaagacataaaagatttaacggctaaacttcgggcgtttgccaatggagaagaagagatcgagggctgctggaccggacaagccaaggagaatcaggaggcggctgggctagcatcggtaaatgcgctgaataacaatttgacaacagacagtgaaatgatggaaatggcgaaagcatgggttcaaggacagcgggtcacctgggacgacctatacggcgatcgcaagccgcttaaaatcagtgttccgacctatccgtttgcaagggagcgctactggatcccggttcctgaaatgaaaaccagcactgtgaatcatatcttacatccgctggtgcaccgcaatacatcagactttactgagcagcgctttagctctgtatttacaggcacggaatttttcctttcagatcatgttgtacagggacagaagattttgccgggcgttgcctatttagaaatggcaagggaagcagcggaaaaagctgcaggcgatctggacggcaaacaaagagtggtgtcgcttaaagacattgtgtgggtgcgtcctatcacgattgaaagtgaaccaaaagaaatacatattggcctttttcctgaggataacggggaaatctcctttgacatttatagcagctctgaacataaagaagaagccctgacgatacactgccaaggccgcgctgtcatttcagatgaagcggacacttccattttaaacctttcatcaatacagacagaatgcagtttggacacagtgacgtcagaacaatgctatgcagcgtttcgaaagattgggcttgactatggagagggctatcaagggattgaaaaagtctatgtcggcaaagatcaattgcttgcaaaaatctcgttacccgcttttctaaaaaacgacaagcagcattttgcgctccacccgagtttgatggattccgcgttccatgccacagtcggttttatcgttagctcagtcaatgccgctggacaagctcagacgctgtctcttccatttgcgttgcaggaggttgatattttcagcccatgtccagagaagatatggtcttatattcgatacagttcagacagtaaagcggaggacaaagtcagaaagtatgatattgatttatgtgatgagaacggacacgtttgtgtgcgaatgaagggtgcctcgatgcgggcacttgatggagagcggcattcaaggtctcaactagtaactgattctcagctgaccgggcatacgatgatgatccccgtctgggaaccagtctctctagaagcggaggataatgcttcgtttgctggtacacgagttgttttatgcggtgctgctgaagctgatcgggcattaataaagcatcattatccgcaagtatcctttatcgatatccggcctgcagatgacattgagggaatagcggacaaactgcaagcgtacggaagcattgaccatgttttgtggattgccccgtcacaccggggaagtataggtagtgatggacaagaagaagctgttcttcacttatttaagcttgtgaaagcatgcctgcaattaggctatggcgagaaacaacttgaatggtctcttgtgacaatccaagcgcagccggttacgcaacatgaggcagtacaacccgctcatgcaagcattcatggacttgccggcacaatggcaaaggaatatccacactggaaaatccgtcttctcgatcttgaaaaaggctgcacatggccggtaaatcacatgtttgcgctcccagctggccgccttggccatgcttgggcctatcgtaatcagcaatggcatcagcagcaattgatcccatatcggcactcactgtcaggcgacacgctatatcggaaaggcggagtctatgtggtcatcggaggagccgggtatatcggagaggcgtggagtgagtacatgatccgccgctaccaagcgcaaatcgtttggattgggcgaagtcaacttaatgctgccatccagtcaaaaatagaccgactttcggcgcttggccctgagcctttctacattgcagccgatgcagccgataagcattcattgcagcaggcttatgatcaagtgaaaatgcgccatcctcatattcacgggattgttcactctgcgatggttttatttgagcaaagcctggaaaaaatgaagccggaagaattcaccgctggactggcggcgaagatcgatgtcagtattcggatggcccaagtgttccgccaggagaatgtagattttgttttattcttctcttcgcttgtagcccatatcaaaaatgtgaagcaaagccattatgcctctggctgtacatttgcagatgcttttgctcaccggctttctcagagctgggcatgccctgtaaaagtcatgaactggggatattgggggaatagtgaagcggctgaggatgaacattatgtacagctcatgaatcaaatcggcttaggtttaattgagcctgcggaagctatgaaggcgctggaagccctgctttctgggccagtcagccaaacagctttcattcatacgacaaagcctgtagcagtcgaaggcgtgaatcagaatgaattcatcgctctttatccagagcaaccttcagcagatgcagagagcctgatggagcgtctgccgactacggcacgatttcaaagagtgacacatgaagagcttgatgatcttctttacaggctgttgttaggacagcttcaaacagccgggctgtttgatggttatacattatcggttgaacgtcttcaacaatataagactcgtgaattttatggaaaatggattcggcaaagcagcgaatttctcttgcagcatggctatcttaagaaagttggagattcattggtgaggaaggaccaagcagaggatatcgagctgctttggcaagaatggaatgcgaaaaaagaaaagtggcttaaagacagcgagacaaaggcgatggttgtattagcagaggccatgctgaaagcattaccggatattttgacagggaaagtccctgcaacagatatcatgttcccgcattcctcgatggaactggtggaaggcatttataagcataacaaagtggcagattattttaataaagtgcttgccgatacattattagcttatctggatgaacgtctgaagcacgaccctgaggcatcgattcgcattatggaaataggcgcaggcacaggcggcacgagtgccggaatctttgaaaaactgaaaccatatcaaaagcatatcaaagaatattgctatacagatctgtctaaagcatttttgctgcatgcagaaaaggaatatggggcggaaaatccgtacctgacatatcagctttttgatgtggaaaaaccgattgatcagcaggaatttgaagcgggaggctatgatgtcgtcattgccgctaatgtccttcacgcaacaaaaaatatccgtcaaacactgcggcatacaaaagcggtaatgaaaaacaacggaatgctgctgctgaatgaaatggcgggaaacagcctgttccctcacatcacctttggtcttttggaaggctggtggctgtatgaagatcctgcagtgcggattcccggctgtccaggcttacatcctgacagctggaaagcggcacttgaaagcgaaggctttgaatctgtctttttcccggccgaggcggcacatgatctgagtcaccaaatcgttgcagcctcaagcaacgggctggttcgccgtatgatgaaaaatgtgatcttgccggagaaggttgtttcacaagcgtctaatcaggagccagcctacattcataccatagattcagaggaagctggacaatcaaaacatgctctcctaagagaaaaaagcacagaatatatgaaaaaactaatcggggaaacgttgaaaattcctgcaggaaagattgagtcatctgaaccgcttgaaaagtacgggattgattctatcgttgttgtccaactgacaaatacattgcgtaaagaatttgaccatgtaagcagcactttatttttcgagtaccagaccattgacgcattagttgatcatttcatcaaaacaaaaacagaagcgctgatgaaattaacaggtcttgaccgtcaagttcaacaacagacaccggccgaaagcagaacccaatcctcacagaaacctgatcaggccgctaaaagaacacggcgctatcgcaagcttggcttcagcggggagaaagaaacaccgacaaacactcttgcaagccgtgacgttgccattatcggcatttctggacgctatcctcaggcggaaacagcagaagacttttggaacaacctaaaagaaggaagaaattgtattgaggaaattccgaaagatcgctgggattggaaagcttattacgataaagaaaaagaaggatcaatttatacgaaatggggcggatttatcaaggatatggacaagtttgacccattattctttcagatttctccgcttgaggcagaaagaatggaccctcaggagcgattatttctgcaaaccgcttatgcaagtattgaagatgcgggatacacgcctgactcgctctgttcaagcagaaaaatcggcgtctttgccggagtcatgaacaaaaattatccgaccggctacggctattggtctatcgccaacagaatatcctatttactgaatttccaaggcccgagtcttgcagtcgatacagcctgctcatcctccctgacagcgattcatttagcgctggaaagcatctatagcggatcgagtgattgtgccattgccggcggtgtcaatttagttgtcgacccggttcactatcagaatttatctgtcatgaatatgctctctgctagtgatacatgtaaatcattcggcgatgatgcagatggatttgtcgacggtgaaggcgtaggcgccattgtgttaaagccgctgcagcaagcaatagcggacggtgaccatatttacggtgtgataaaggcaagtgccattaatagcggaggaaaaacaaatggatacacggttccaaatcctcatgcacaggcacaggtaattaaagaagcaatggagcgcgccgacattcctgcccgaaccatcagttatttagaggcgcatggaacaggcactgcattaggagatccgattgagatagcggggttaacaaaagcatttgagaaagatacgcaagagaaacagttttgtgcgatcggctccagcaaatcaaatatcggtcattgtgaaagtgcagccggaattgcagggctgacaaaaatactttttcagtttaaatatggccaaattgcgccatcattgcatgctcagcggttgaatccgaacatcgagttcagccatacgccatttgtcgttcagcagcaacttggtgaatggaaacgcccggtgattggcgggcaagaggtgcctaggcgcgctggcttgagcagttttggcgccggagggtccaatgcccatatcatcctggaagaatatattccaagaacgggggcgcaaacgccgaaagaccatcctccagcgctgattgtgctgtcggccaaaaacatggaacgcttgcaagaaaaagcggaacagctgcttacagccatcaaacaaaaaaggtaccgcgaaacagacctgatcaggatcgcctataccttgcaaacaggccgtgaagcaatggaagaacggctggcctttatagcggaatcactagaggatcttgagagaaagctgaacgattttatcgaaaacaaagcagacagcctgtatctggatcgcatcgaggataacaaaaaagcgttagcagttttatcagcggatgaggatacggaaaaaatcatagaagcatggatgagcaaagggaaatacacgaaactactggatctttgggtgaaaggcttgtctttcgactggggcatgctgtacggcacccaaacgcctgtccggatcagtcttccggcatatccatttgcaaaagaacgttactgggcaccaggcgcggcaaaggctccggcgtctatagaacaggatcatgatcagcaaacagaagaacctttcaaggttatgacttttcaagaagtgtggaaagaagagccggcgactctcacatcgaaacgtatcaaaacgctcatctgttttctgactgaaagagaaaagcaaaacgcatttgcttcagccctgaaaaacgttgatcaagacaccaaggtcatttttatatcacagggcgaagtgtacagcaaacagtctgaatatagctaccagattgtgcggcaagaacccgttacttttgaaaaggccttccagagcattaaagaagaacttggagagccagatgcaatcctctatatgtggcctatggaagacaagcgctgtataaaggaccattcctgtattgtttacctattacaaggtatgtccgcagcaaagcttcatccttcacggctgctgctggcaggatgttttgaagatggtcttgaccgaagttatctggaatcatggattggcttcgaacgttcactcgggcttgtcctcccgcacacaaaagtgactggaatctttcagccggtggaacaaggatcgatggatgattggacacgtaaaatatggggagaattacaggcttcagctgaacaaacggttttgtatcagaatctgaaacgatatgtaaatcacattgaacagacaacgatacaaccggacgacagcaaattgaagtctggcggtacttacctgattacaggcggtgtaggagggcttggttatttatttgccaagcatttggccaaaaactatgccgcaaacctgattttgacagggcggtcgccttttaatgatgaaaagcaaaagcaaataaaagaattaaaggatctaggcggcgaagcgatgtatgcagaagcagatgtgtctgatcctatcgcaatgggagactgcgtaaaaagagggaaagaccgattcggtgccatcaacggtgtcattcatgcagccggaatcgagagcgactctgctatttttgacaaaaagatcgaaagctttcagcgcatcattgaaccgaaaatcaacggcacgatagcgcttgatgaatggcttaaaaatgaagaccttgattttatgtgttatttttcttcttcttctgcggttttaggggattttggatgttgtgattatgcgattggcaataggtttcagatggcttacgcacaatacagaaatgagctgcataacggtaaaacgtttgtcatcaactggcctgtatggaaggatggcggaatgaagatcggtgatgaggaaacaacggatatgtacctgaaatcaagcggccaacgcttcctagaagccgaggaaggcatccgtatgtttgagcacatcctagctcagcaggatgctcagcatctcgtgatagccggtcagcccagccgtgtcagcagatttttaggaatgactgaaccagctattccagaaccggccactcaagcccctctagcacaagaaaacaaggatgaggtaaaaacgttaagcattgaaaagcgtttagaacacgacttgaaagagcatattcacacattgcttaagatttcaaaggacaagctgaatttgaacaaaaattgggccgacttcggatttgattcaatctatttggctaaattctcgaatgtgttatcaaagcatttcaacatcgaagtgacaccggctttatttttcggctattcgactttacaagaattgatcggctttttcttaaccgatcataaagagctgattgaagcattttaccgggatgatgcatcagaggcgcaaaagccccctgaagcttatgcagcaattcctgtagctccagaaccggaaaccagtaaacaaagcattcggcaggttcacgatgagcctattgccattatcggcatgagcggcaggttccctcaagctgattcggtccatgagctgtgggataatctgaaaaaaggtaaatcgtgtatctctgacatcccgggcgaacgccgggactgggggagagctaacagagatccagaaaaagcagtgccaaggtggggggcatttttgaagggcatagaccggtttgatccgctgttttttcaaatatcgcctaaagaagccgaaagcatggacccgcgccagcgcatttttctagaggaagcatggcacacgtttgaagacgccggctatatgggagatcggataaaaggaaaatcctgcggtgtttatgtaggtgtggaagaaggggaatatgcgcatctaaccggagatacggattacattaacggaacacaaaacgccacattgtctgcgagaatcgcatacgcattggatttaaaagggcctaatatggctttgacagcagcatgttcatctggactggtagcgattcaccaggcatgttcagctctgcgtcagggggattgtgaaatggctttagccggcggcgtcagcttgaatatttctcacatgtcttttgaggcgctgacaagggccgaaatgctgtctccgaacggacaatgcaaagtgtttgaccaggatgccaatggtcttgtgccaggtgaagcggtggctgctgttctcttgaaaccattatcaaaggcaattgaagataaagatcatatttatggctgcatcaaggccagcggcgtgaattacgatggcaaaaccaacggcattactgcgccaaatccttttagccaggcagaattgatcgaaaacatttatgaaaaaaatgaaatcaatccgctcgatattcaatatgtgatggcgcacagtaccggctcgaatcttggtgatccgcttgaggtccaagcgttaacgagcgtgttcagcaaatatacgaagcagaagcaattctgtatgatcagctcaattaagcctttaatcggacatacatttgcagcgtcaggaacggttgctttaatcagtatgctgatggctatgaaaaaccagatgattccggccactcatcactgtgaatcggaaaaccagtatattccgtttaaagaaagcccatttgtgctttgcaaagaaaaccgttcgtggatcaggaaatatcagaagccgaggatgggaacgatcagcacgactggaatcagcggcaccaatgcacatgcagtcattgaagaatacattccggaagatcagccgcccacacagcggcatcaagggtcaccgcaggtcatcgtgctttcagcccaaaatgacgatcggcttcaggatgctgcctgccgcatgattgcgtatctggagcagaatcataacctttctttacctgatatggcatatacgcttcaggttgggagaaaagccatggaagcaaggctcgcgatcgttgcaaacaatcagaagcaattggtgcaaaaattgaaggaatatgtggaagcaatgaagaatggtggggtatcaggccaacagagatccctttatacaggatatacagaagggattttagaagaacaagatgaagcagttctgcaagctctcgcaaaagaaagaaatttggaaaacatcgcggattgctgggtgaaaggatatcagattccttgggaactccttcatgatggcgatcacgttcgaatggtttctttacctggttatccatttgcaagggagcggtattgggtttcgtcaggcacccagcaatcagtggccgttaaacagcattcacaagatatgaaaacagagattgacgagccgaatggcaaaaaccatattcaaaagatcattgttcaatttttagcacgagaattgggcatatctgaggatcgaatcaatttcaaaagaaactttttggattatgggatggattcaattcttggccgaaaattgatgcggcatatcgaaaaaaccacgcagctgaagatggccggtcgggaaatccttgaatgtcagacagtccaagctctatctgaccatttggccttaaaagcggaaaaacaaaatcatagcgcagcagcacatcaaataaaggacacgtatacagacgggcaaatcatcggattaatgcaagaggtggcgctagggaaattggattttaagagtgtgcaaaacatcatagaagggagtaaatcgtatgaatcataaagaaattctcgatgccttcagatcaggagaattaaccatttctgaggtggaagaacatcttaaaggcatgaagcggcagttgaaaagcccgctttctgaagggcaaaaagggctgtggatgcttcaaaaaatgtctcctgggatgagtgcatatcatattcctttatgctttcgcttcagcaaaccaatacatgcagagacgttcaagaaagcccttctgtttgtacagagacaatatccgatcttagccagtgtgattcaagaagaaaatggcattccatttcaatcggttcagttatcaaaggatctttattttgtggaagaggatatatcagcaatgaaatcagcagatatctttccttttctaaaagaaaaagcaaaagaacctttccagttggaagctggtccgttatggcgcacacacctttttcatcggttagaagaatgcattgttcttataacaattcaccatatcatatttgatggtgtgtcgatgctgacattgatatcggcgctattcgaagcgtatcaacaattgctgaatgggattgagcccttgcagcagccattaacagctgattattacgattttgtcgattgggaaaaacggatgctgactggcagagaaggggaagagcatctcgcttactggaaagaacagttgtctgggagtctgccagttcttgatttgcctgctgaccgtccgcggtcttcatcacgaaaattcaaggggcaagcttataaaagcttgctcccccatcacctgagcaatcaaattaaatcgtttgcccgcaccaatcatgtgaatgaatcggttgtgtttctctccatttacaaagtgttgctgcatcattatacaaaacaaaaggatatcattgttggcgttccgacaatgggtcggcaagatgacagatttgaaaccctaatcggttattttatcaatatgatggctgttcggagcaagaatatcggatctcagccattaacagcatttattcgggaactgcagctgacagtggctgacggcctggatcatgcggcgtttccgttccctgcattggtaagagagctgaatgtagaccgatcggccgcggattctccggtttttcaaacagcttttctgtaccaaaacttttttcaggcaacaggcttgcaaaaagtgctcgaaccgtatcaaacgcttggcatcgaatatattgaagacattcggcaagagggtgaatttgagctggcgctcgaaatatatgagcaagaaaatgaaacagtgcttcatcttctgtacaaccctgatttgtatgaactgtcctccattgaaaacatgatggagaactatatgaagctcgcgcaacacatgatggatgacccgtctttgccgcttgaagcctactctttgcgattaaatcaagaacaaactaatttggtggaacaatggaatgcgacagggacaaacatcgcaaatgacaagtgtatacatgaggtgtttgaggaaaaagcgaaacaaacccccgatgcggttgctgtgatgtttgaagacagatcacttacatataaagaagtagatgaaaaaagcacatctgtggcagtctaccttcaacatcagggtgttagacctgaacagcccgttggcatttgtgcagagcgttcgtttgatatgatcatcggaattttaggaatactgaaagctggcggagcgtatgtgccgttagatccaagttttccgcaagaacgattagagtacatgctcaaagacagtcaggcatccattgtcctcacccaacctaacgttcatgataggatcagcggattaactggcagccatgtaaaagcgatcaatatcgagttagcttgccgaaacgattatacagaccagcaaagcagcggtttaaagcgggaagtaaaaccggaacacctcgcttatattatttatacatcgggaagcaccggagagcctaaaggggttatggtagagcatcggagcattatgaataccctgaattttcttgaatctcactatcctgtaacggctgaggatgcatatttattgaagacgaactatgtgtttgatgtatcgatctcagaattattcggatggtttattggagacggccgtcttgtgattcttccgcctaatggggagaaatcaccgcagctttgcatggattatattgaaacatataaagtgactcacattaattttgtgccggccatgctgcatgtttttttagaaatggcgaaagacaacaaacgattcacagaggatggtccgctgaagtatatgatggttgcaggtgaagccttccctaaagaattagtgaaaaaggcggtatcactctttacaaactgccgtgttgaaaatatatacggaccgacggaagcctccatttacgctgcgtatttcggatgcggaaaaggagatatcgcaagtcaccatacaccgattggaaagcctgtctccaacacgaaaatttatattgtggaccagcatttaaagcctgtcccgatcggaaagcctggtgagctatgcatcgctggagccggcttagcaagaggctactttaaaaagccggggcttacggctgaaaaatttattgataatccctttgaaccagggacgaagctatataaatcgggtgattcagcaaggtggcttcctgacggcaacatagaatacttgggacggattgacagccaagtcaaaatacgcggttttcgcgtcgagctgggcgcaatagaaacaaagctgagtgaatttccgggcattttagatcaggccgtagtggtgaagcagctggaaggccatcaacagctcgctgcttattatacagaggaaagcggacatgcctctgccaatccaaaagatttgcgccttcatctaaaatcgagtctgccggaatatatgataccttcacactttatccgcttagatgagcttccattatcgcccagcggaaaagtgaaccgtaaagaattagaaaaacgcgagatcgtgttcaacataaggaaaccaaatcacttgcaattaacggaaatagaggatcaggtgctgcgcatttgggaggaaacgctcaaggtcagcggatttgggccggatgacggatttttcgatgcgggcggcgattcgcttctggctgtagctgtggctgaacgaatcaaaaaagaattcgattgtgagtttcatgttactgagctgtttgagtattccacgatccgtgcaatcagtgaatacattttggagatggaaaactcagatctagccgggacacaaaatgaagatcattatgatatcaaaaaagatagaaaacacctagaacagaagattcctccttattttgacgacagtgttgcgattgtggggatatcttgccagttcccgggtgcgaaaaatcatcatgacttctggaaccacatcaaagaaggcaaagaaagcatacgattcttttctgaagaagagcttcgcgcaaatggagttcccgaagaattgatacagcatcctgactatgtgccggtgcaatctgtgatcgaaggaaaagacttattcgatcccggtttctttcaaatctcgccaaaagatgctgagtatatggaccctcagctccgcctcttattgctgcactcctggaaagcgattgaagatgcaggatatgtggctaaggagattccggcaacaagtgtatatatgtctgcaagcagcaattcatatagaacgttattgccgaaggagacaacagaaggacatgaatcaccggatggctatgtctcatgggttttagcccaaagcggaaccattcccacaatgatctcacataagctcggattaaaagggccaagctattttgttcattctaactgttcttcatcactagtcggtttatatcaggcatacaaaagcctgacatcgggcgaatcacaatatgcgcttgtcggaggcgcaacattgcacgcacaatcagcgatcggctacgtgcaccaaaacgggttgaatttttcaagcgacgggcatgtgaaggcgttcgatgcttcggcggacggaatggccggaggtgaaggcgtagcagtcatcctgctgaaaaaagctgtggatgccgtaaaagacggagaccatatttatgccattatgcgcggaataggcatcaataatgatggggcagagaaggcaggcttctatgcgcctagtgtaaaaggccaaacagaagtgatacagcatgtattggatacaaccaagatccatcctgaaacggtcagttatattgaagcacacggtacgggaacgaaattaggcgatcctattgaaatgtctgcgctaaataaagtgtacaagcaatacaccgacaaaacacaattttgcggaattggttcagtgaaaacgaatatcggccatttggatacagctgcggggttagccggatgcattaaagttgcgatgagtttataccataatgaacttgcaccgaccatcaattgtacggagccgaatccggatataaagtttgaaagctctcctttttatgttgtccgtgaacgaaaatcgttagagaaacacgcaggtgtccatcgggcggctctgagctcattcggccttggcggaactaacgcccatgcaatatttgagcaatatgaaaacatttctgatgcaggtaccgaaaacgaaggcaatcagccttacatcattcctatatcagcaaaaaatagtgaacggctccaagtatacgcgaaggaaatgctgtcctatatcagtcaagacgagcaaaggcatttctctttaagagatattgcatataccttccaagtcggccgtgaagcaatggataacaggatcgtttttatagtgaacgatctggaagagtggaaacatcagctggaagcttttgtgactggaaagccgctcgcagaaggctgtattcaaggagaaaaaacgagaatgacatccgctgaacagctgcttggaaatgctgaagcagatgatatggcttcatcgcggatatcaaaagaagaattgagaaagcttgccgagatgtgggcaaatggctttcacgttgaatggcgcaggctctatccaaatataaagccacgccgcatcagcttgccgacatacccttttgccgaagaacgatactggcctgaaagcagcaccggcgctatcacaacaattgaaccatctcgtttgcatcctttggtgcaccataatacatcggttctgtcagagcagcgtttcagctccattttcacaggacaagagtattttattgccgagcatatcattaaaggcatggcgattttgccggcggcggtcacgcttgaaatggcaagagccgctatagaacaaggaattggcggattggaggatcatgaaactggaatcaggctgaaaaatgtcgtgtgggttcgcccggttgtagcaggaagtgagccggttcaggtaaatatcggactttacgatgaagatggcggacatattgcttatcggatgtatggtgatccggaatacgctgatgcagaaccagttgtatataaccaaggtaaagcggaattgattcagttaaagcgagaaaaagcactggatctttctaagatcaagaaacaatgtgatcaaagcaaaatggatgctgcctcgttttatgaagggatgatcggcgccgattacggtccaggttacaagagtgtagaggccgtatataaaggcgacggccagctgcttgccaaattatcactgccagaatctgttgcacatacgttgggcgattatgttcttcatccaagtgtaatggacggggcgttacaggcggctgaatatttgcaaaatgtcgtcagagcggaactttcagacactgaagactttaaggcagcactgccatttgcactggaggaacttgaggtttttcgtcagtgcgtttctgacatgtgggtttatgttcaattcaactcgaaaaacaaaccgggagatttgatacagaaagtcgatattcacctatgtgatgagcatggcatgatctgtgtgcggctgaaaggattttcgacgagagtgatggaggcagatatacaaaccgaaccatcaaaaatcaacgctgaaactttattgcttcagcccgtttggcaagaacaaaaggctgctaacagcttagctgcaaaaaaatatgcagagcatctcgtattcctatgtgaatatgatcatgagacgagaaaacaaattgaagcagctatcgaggatgtccatgtatacagcctggaagcaaggccttcttcagtagatgggcgtttccattcttatacagaacaagtgtttaaaaaggtacaagagatcattcgtacgaaaccgaaagacggcattctcgttcagatcgtgacctctgccgagggagaacagcaattgttttcagggttgacaggactgctgaaaacagcttgtcaggaaaatgccaaactaaccggccaaatgattgaagtcagcagtgaagaaagtggagaaagcattgctggcaaactgttagaaaatcaaatgagcggcgattcatatgtcaaatatcaaaacgggacacggtatattgctgattggcgtgaaatcaaacaggcaaaaggagacggcagcaaaccgtggaaagacaatggcgtttatctcattacaggaggtgccggcggactaggtcatatttttgcaaaggaaattgcggaacaaacgaaaaatgcgacagtcattctggcgggccgctcacctcttagcgaaagcaaaagcaaaaagctgaaagagcttcatagcaagggggctgacatcacctaccggcaaacagatgttaccaataaaattgaagtctatcagctcattgacgacattcaaaaaagatatggccgtctgaacggtattcttcatagtgccggaatcatcaaggacagctacctggttaataaacaggcaaaagatctgcacgatgtactggcgcctaaagtaaaagggcttgtttatctagacgaagcgagtaaggatttgcctttagacttctttattctcttttcatctctttcaggaagtttagggagcattggtcagtctgactatgcggcagccaatgtatttatggatatgtatgcaggctatcgaaatcggcttgccgacctcagccagcggcatgggcagacgctttctgtaaactggcctttatggagagatggaggcatgcaggtcgatcaagaaactgagaaaaggcttgtgcaacttgccggtattgttcctatgagggcggaaaaaggaattcaggcattatatcaagcacttcattcagaggcaaaccaagtaatggtgatcgaaggcgatgtgcagaaaataaaacaaaacatgctggccaaaaacgcctcagcacctatggaaaagaaggaagcagaacacatgactgaacaaataaatagcattgatgcagacagtttgctggataaagtaaaggcgatgttaaagcgagagatcgccaagctgttaaaggtcaagcttgaaacgattgatgatcatgccgagatgacggtgtatggttttgattctatctccatgactgaattcaccaaccatatcaatcgcgcctatcagttagagctgacgccaaccgtattttttgaccacccgacgattcatgcgtttggcaagcatttgtcagaagaatatcaatcggtatttgcgaagacatttgctgtgcgcgctgtatcggctcagattcagcctgccgcgaaacaggaacaagccgtgcgtgccaaagctaaaagacgcagaaagcagcaagtcatgctgccaaacgccatacagagtgatgctgggcctgagccaattgccattgtgggcataagcgggattttccctatggcgaaagacgttgaggcgtactggaacatcttaaaagagggcaaagactgcatgacggaaatcccgaaagatcgctgggattggcgtgaatatgaaggtgatccggcgaaggaagtcaataaaacgaacgtgaaatggggcggttttattgacggtattgcagattttgatccattattctttggcatttccccgcgtgaagctgaacaaatggaacctcagcagcgcttactgctgacttacgcctggaaagcgatcgaagatgcaggatattcggcgaaaaggttgtcaggcacaaagaccggcgtcttcatcggaacgggaaatacaggatacagctctcttctatctaaagcgaactcggcaatagaaggatcagcggcagccaatacgagcccatcggtcggtccgaaccgggtcagttatttccttaatctgcacgggccgagcgaaccgattgatacagcgtgctcaagttcactagtggcgatccaccatgccatctcttcaattgaggaaggcacttgtgacatggcattagccggcggtgtaaatacgattatccttcctgaggtgtatatcagctttgataaggcgggagcactgagcaaagaaggaaaatgcaagacgttttcaaatcaagccgatggttttgcgcatggggaaggtgccggcatactgttcctgaaaaaattaaaagcggctgaagaagcgggagaccacatttacggagtcataaaaggcagtgcaatcaatcacggcggccgtgcagcctctttaacgactcccaatccgaaggcgcaggcagatgttattcagtcggcatatcaaaaagcgggaatcgatccgaaaaccgtgacctacattgaagcccacggaaccgggacggagcttggagacccggttgaaattaacggtttgaaatcagcttttaaagcattgggtgtaaatgaaggagacacatcagtcaatccttactgcggtttaggttctgtaaagacaaacattggccacttatcgctggcagccggtgcagcaggagttattaaaatattattgcagcttaagcataaaaccttagtgaaaagtctgcattgcgaaaacgtgaatccatacattcagctgaaaaacagtccgttctatatcgtacgggaaacggaagaatggaaagcgctgaaaaatgaacggggagaagagcttcctcgccgggcaggtgtcagttcatttggaatcggcggggtaaacgcccacgtgattatcgaggaatatattccggaagcatccgatgagaatataccatccatcacgccggaacatccgggtatcttcgttttatcggctaaaaataaagcgcggctaaaagaacatgcacagcagctggcagatgcgcttgataagcaatcatatagtgacgtaaatctcgcccgaatcgcttatacactgcaagccggacgggatgcgatggaagaacgtctcggggttatctccggttccattgaggatgtacagcaaaagttaaaagactttgcagcaggcaaaagcggtgtggaggatgtatttaaaggcaggattgataaaggcacactccaaatgctgacagaggacgaagagattcaagaagctgtcgagaaatggatggaacggggaaagtatgcaaaattgcttgaattatgggtaaaggggcttgatgtagactggacgaaattgtatggcgagaatctgccaaagcgcatcagcttgccgacgtatcctttcgcaaaagaccgttattggatctctgatcatattgaaaaaatcggcagcattgatgcaaatcaagcagcctcccgccttggcggagccgtgctgcatccattaatgcatcaaaacacatcgaatctctcggaacaaaggtttagctctatttatacgggagaagagtttttccttgctgatcatgttgtgaaaggccaacggattttgccgggagtggctcatcttgaattggcgcgggcagctgttgagcaggccgcagaggtagaaggtgtaccgtgcaccatgaagctaaagaatgcggtgtgggtgcggcctattgttgtagaggatcagccacagcaagtacacattaggcttttaccgggagaaaatggtgagatctcttatgaaatctatggtcattcagacgttactggcgaacagtcaattgtctacagtcaaggcagcgcggtattgaatcctgctgaaaatctgccggcggttgattttcaatctctgcgggagcagtgtcaggaaagccatttcagcgtaaacgaagtatacgacacctatcgaatgattggatttgaatatggtcctgcttatcgcggagtgaaaaaaatctatacagctgaacaatttgttttggcaaaattgtcattgcatccgtcagctgcagatacgctcagccaatacaaaatgcaccctgggctgatggattctgctttgcaggcgtcaagcattttgacaggcgccggggataaccagctgacactgccttttgctatccaggagcttgaaatcttcggagcatgctcgtcagaaatgtgggtatacgcaagatacagccaaggcagcaaggcaactgataaggtgcaaaagcgcgatattgatattttagatgagagcggcaacgtttgcgtacggatgaaaggattatctttcagagcagcggaaggcggctctggatcggcggaatctgatcaaacgctggcaaccctgatgtttgaagaaaaatgggtgcctaaggattttaaaaaagaaagtcctgagcctcattacgaacggcacattgtcatgctttgcgacatgaatggcctctcaaaagatcgcattgaatcaagattgacaggagcggaatgcatcgttttggagtcattccgcgaaggacttgcagagaggttccaagattatgccgaacaagcgcttgagacggtccagggtcttctcaaaagcagacctcagggcaatgttctgatccagctgcttacctctgcacaaagaaagcagtactcattctcagggctatcggcgctccttaaaaccgccggcctggagaataaaaaactaatcggccagacgattgaaatcgattcacatgaaaatgttgaaagtgtaatagaaaaactgaaagagaataaaaggcacacagaagatcagcacatcaaatatgaaaaaggcaaacggtacatcaatgatctggatgaaatgcaaatagatgatcgggaaataagcatgccgtggagagataaaggtgtatacctcatcacgggcggcgcaggaggacttgggtttatttttgcaaaagagattgctcgtcaagccgaacagcctgtactcattctgacaggcagatccgcgttgaatgcggatcagcaggcggagcttaacgaacttcagcaattaggggctcgcgcagaatacaggcaggttgacgtgacacaaacggaagcagcctccgagcttatcacaagcattacgtctgattacgaagacttgaatggtgtcattcacagcgctgggctgattaaagataactatcttatgagcaaaaccaatgaagagctgacacaagttctcgctcctaaggtgaaagggcttgtgaatgtggatgaggcaaccgagcatcttgcgttagatttctttatcctcttttcttcaatatcaagtgttgccggcagcgcgggacaggccgattatgcaatggctaatgcatttatggacagttatgctgcttatcggaatgcgcttgtaaccgccatgtacaggcacggacaaacgttgtcaatcaattggccgctctggaaagaaggcggcatgcgcgcgaataaagaaattgaaaacatgacgttgaaaaacacaggtgtgactccaatgcggaccgagaccggcattcaagcgctgtataaaggtttggcatttggcaaagatcaagtcatcgtcatggaaggattcaaagacatgatgagggaaaagctgactcaaaagccgtcttctgatgatgtaccaatgaaaacagtgcaagtacgggtgacatctgaagcaagaatggatcaagggaatatgtttgaccacattcaagaagttttaaagcaaacaatctctcaattgctcaaaatcaaacctgaagagattgacccggacatggagtttaatcaatatggatttgattcgattacgttaactgaattcgcaaatacactgaatgagaagtgcaagctggatcttacgcctacggtcttctttgagcacgcaactgtttatgcatttgcagggtatctgtcagaagaatatccaaatgcttttacagctcaaacgcctgccaaagctgaggtgctaatgcagcctgtcgaacagaatataaaaaatatgacgttttcgactgaaaaccgctttgtaaaaccttcggtaacaccaatgcaaaaggaagctgatcacaagcctgagcctattgcgattgttgggatgagcggcgttttcccaaaggcaaaagacgttgaggaatattggaagaacctgtcatcgggcgcagattgtattacagaggttccaaaagaccgctgggattggcaggagtattacggagaccctctgaaagaagcgaataaaacaaacgtcaaatggggcggttttattgatgaagttgctgactttgatccattgttcttcggcatatctccgctggaggctgagcagatggagcctcagcagcgcctgttgatgacctatgcgtggaaggcggtagaagaagcgggacactcagcgagaagcctggcaggaaccaaaacgggcatcttcattgggacaggaaacacagggtacagttcacttctgtcaaatgtagacatcgaaggctcagcggctgcgaatatgagtccttctgcaggaccgaatagagtcagttatttcctgaacattcatggaccgagtgaaccgatcgacactgcgtgctcaagctctttggtcgccattcatcatgcggtttgcgccattgaaaatggaaactgtgaaatggcgattgcgggaggggtcaacacggtcgtaactccgcaaggccatatcgcctatgataaggccggggcgctgagcaaagaaggaagatgcaaaacattttctgacaaagccgatggattcgcagtcagtgaaggtgccggcattctctttctaaaaaagctgacagcggctgaacgagacggtgatcatatttacggtgtcattaaaggaagtgcggtaaaccacggtggccgcgcaaattctctaacgactcctaatccgaaagctcaggcggatgtcgtaaaaacagcatatgaaaaagcgggaattgatccaagaaccgtaacttatattgaagcgcatgggactggaaccaagctgggcgatccagtagaaatcaacggcttaaaagcggcatttaaagagctgtatgaaaaaacgggggacccggctgttcatggcagccattgcggacttggatcagcgaaaacaaacatcggtcacttatcgcttgcggccggtgtggcgggtgtcattaaagtgttattgcagctcaagcataaaacgcttgtcaaaagtctgtacagtgaaactgttaatccatatatcagactggatgacagcccgttttatattgtgcaggaatcgagagagtggcaggcgcttcgggatgaagctggccgagagctgccgcgccgcgcaggcatcagttcgttcggaataggcggcgtcaatgcccacgtggtcattgaggaatatattccgaaagaaacaacccatcctgcaacagcaccagccgtgacagcacagcacccgggcatctttattttgtcggcaaaggatgaagatcgtctgaaagaccaagcccggcaattagcagactttatcagcaagcgatctatcactgctcgtgacctcactgatattgcttatacactccaagaggggcgtgatgcaatggaggagagattagggatcatcgctgtctcgactggggacttgctggaaaaactgaacctctttatagaagggggcaccaatgcgaagtacatgtacagaggcagagcagaaaaaggtatcgcacaaacattgagatcagatgacgaagtacagaaaacgctcaacaatagttgggagcctcacatatatgaaagactgcttgatttatgggtaaaaggcatggaaataggctggagtaaactgtatgacggcaaacagccgaaacgcatcagcctccctacctatccatttgcgaaagaacgctactggataacggatacgaaagaggaggcagccgcccatcaaacagctttaaaaacagtcgaatcagcagctttgcatccattgatacatgtcaacacatctgatttgtcagagcagcgtttcagctcggcctttacaggtgctgagttctttttcgccgatcataaggtgaagggaaaaccggttatgccgggcgtggcatatcttgagatggttcatgctgccgttacaagagcagtgagaagaaccgaagatcaacaatctgttattcacatcaaaaatgttgtgtgggtgcagccgattgtggcggatggccagcctgttcaagtggatatcagtctaaatccccagcaggacggcgagattgcttttaacgtctatacagaggctgcacacaatgatcgaaagatacattgtcaaggcagtgcttcaatccgtggggcaggagacattccagtccaggatatcagcgcgcttcaagaccaatgcagtttaagcacactctcacacgaccagtgttatgaattgtttaaggcgatcggcattgactacggacctggttttcaagggatagatcggctttacatcggccgcaatcaagccttggcagagctttctctgcctgctggtgtaactcacacactgaatgaattcgttcttcatccaagtatggccgactctgctttacaagcgtcgatcgggctaaagctgaattccggtgacgagcagctttctctgccttttgcgctgcaagagctagaaatattcagcccgtgtacaaataaaatgtgggtgtctgtgacatctcgtcctaatgaggacaaaatacagagactggatattgatttgtgtgatgaacaaggccgagtgtgtgtaagaatcaaggggattacctcaaggctgctggaagaaggcatacaaccgccagacgggccgacatcactaggaaactccaaagcaactcttaacggagcgcttcttatggcgccgatatgggatcgagtgcagctggagaagaggagcatttcgcctgctgatgagcgtgttgtcatcctcggaggggatgacaacagcagaaaagctgttcaaagggagtttccgtttgccaaggagctgtacattgagccgaacgcatcaattcatagaattacaggccagcttgaagcactcggatcgtttgaccacatcgtgtggatgtctccttctcgtgtgacagagtgcgaagtcggcgatgaaatgatagaagcccaagatcaaggcgtcattcaaatgtataggctcattaaggcaatgctttctttaggctatggacagaaggagataagctggacggtcgtgacggtgaacacacaatatgttgatcagcatgatattgtcgacccggtcgatgccggggtacacggcctgatcggttcaatgtcaaaagaatatccaaattggcagacaaagctgatcgatgttaaaaaatacgaagatctgccgttatctcaactcctttccttgcctgccgatcaagaagggaatacgtgggcctatcgaaacaagatttggcataagcttcgtctaattccagtacacaacaatcaaccggtgcacacgaagtataagcacggaggtgtttatgttgtcataggcggagctggcggtattggtgaggcgtggagtgaatatatgatcagaacatatcaggcgcagatcgtttggattggcagaaggaaaaaggatgcagccattcaaagcaagctggacagacttgcacgtctagggccagccccgtattacattcaagcagatgcggctaaccgagaggaattagaacgcgcgtatgaaacaatgaaacaaacgcatcatgaaatcaacggcatcatccattctgcgattgtcttacaagaccgaagcctgatgaatatgagtgaggaatgtttcagaaacgttcttgctgcaaaggttgatgtaagcgtgcgaatggcccaagttttccggcatgaaccactggattttgttttgtttttctcttccgtacaatcgtttgcaagagcttccggacaaagcaattacgctgcgggctgcagttttaaggatgcttttgcacagcggctgtctcaagtatggccttgtacagtagccgtgatgaattggagttattggggaagcattggtgttgtttcatcaccggattaccaaaagagaatggctcaggcaggcataggctcaattgaagcccctgaagcaatggaagctttggaattgctgctcgggggaccgctgaagcagctagtaatgatgaaaatggcaaacgaaacgaatgatgaagcggaacagacagaagaaacgattgaagtgtacccggaaactcacggctccgccatgcaaaagctgcgaagctatcacccgggtgacagcacaaagattcaacaactgttataggaggagaagcgccaatgctgaacacagaagacattctctgtaaaatgcttttcgcacaattacagtccatagggtttttcacagaaagtaaatcccagccggtattggagaatttctatggcagatggtttgaagaaagccaatcgattttagaacggcatcaatttctcaagcgaacggagaacggacatgttccaacacgctcaataggcaccatgagcgagctgtggaaagaatggaatgaacaaaaatctgacctgcttcaagacaataatatgaaagccatggtgacattggtggagacagcacttaaagccttgccggagattctgaccggcaaggcgtcagccaccgatatcctgtttccgaattcatctatggatttagtagaaggggtctataaaaacaatcaagtcgcagactattttaatgatgtgcttgcagatacgttaacagcctatctgcaagaacgtctgaagcaagagcctgaggcgaagattcgaatattagaaatcggagctgggaccggcgggacaagcgcggctgtttttcaaaaattgaaagcatggcagacacatataaaagaatattgttatacagatctgtctaaagcttttctaatgcatgcagaaaataagtatggtcctgacaatccatatttgacatataaacggtttaatgtcgaggagccggcgtctgaacagcatattgatgcgggaggctacgacgcggtcatcgcggcaaatgtgcttcatgccacaaaaaatatccggcagacattgcgaaatgcgaaagcagttttgaaaaagaacgggctgctccttttaaatgaaataagtaatcataatatatattcgcatttgacgttcggccttttagagggctggtggctgtatgaggaccctgatctccgcataccgggctgtccgggcctgtatccggatacttggaaaacggtgcttgagagtgaaggatttcgctatgtttcctttatggctgaacaatcgcatcagctcggccagcagatcattgccgctgaaagtaacggagtcgtccgtcaaaagaagagaacgggggcagaagaagatccaagccatatacaaatgaatgctgaaatcgctcattcacaggaaagcgattctctcatcgaacaaacggcacaatttgtgaagcatacgctggcaaaatcaatcaaactatcaccagaacgtattcacgaagatacgacatttgagaagtatggaattgattcaattttacaggtgaatttcattcgtgaattagaaaaagtgacgggagagcttccaaaaaccattttatttgaacataacaacacaaaagaactcgtcgaatatttagtaaaggggcatgaaaataagctccggacagcattgttaaaggaaaaaccgaagcctgcaaaaaatgaagctcctcttcaaacagagcgtacagatcctaataagccatttacttttcatacacgccgctttgttacagagcaggaagtcacggaaactcagctagcaaataccgaaccactaaaaaaagaaaagacaagtaatttgcaaggaacacattttaatgattctagtacagaagatatcgcaataatcggggtaagcgggcgctatccgatgtctaacagtttagaagagctttgggggcatttaatcgccggagacaattgtattacagaggcaccggaatccagatggcgcacatctttattgaaaacattatcaaaagatccaaaaaagccggcaaataagaaacgctatggcggatttttacaagatatagaggcatttgaccatcagctttttgaggtggaggaaaatcgggtgatggaaatgacaccggaactccgtttatgtttagaaaccgtctgggaaacgtttgaggacggcggctatacgcgaacccggctggataaattgcgggatgatgacggagtaggtgtttttatagggaatatgtataaccagtatttttggaatatcccatctttagagcaggcagtcctcagctcaaatgggggagactggcacattgcaaatcgcgtttcccacttttttaacctgaccggaccgagtatcgctgtcagctcagcatgctctagttcattaaacgccatacatcttgcgtgtgaaagcctgaaattgaaaaactgctcaatggcgattgctggaggcgtcaatttaacactcgatctctctaaatatgattctttggagcgtgccaatctgctgggaagcggcaatcaaagcaaaagttttggcacaggaaacgggcttattcccggggaaggcattggagctgtcctgttaaaaccactttcgaaggcgatggaagatcaggatcatatttacgctgtgatcaaaagcagttttgccaaccatagcggcggaagacagatgtatacagctccggacccgaagcagcaagcaaagttaattgtcaagtcgattcagcagtcgggcattgatccagagactatcggctatattgaatcggcggcaaatggttcggcgctgggcgatcctattgaagtaattgccttaacaaacgcgtttcaacaatatacaaacaagaaacagttttgtgcgataggctctgtcaaatccaatctggggcatttagaggcggcttccggcatttctcagctgacaaaagtgctgctgcagatgaagaaagggaccctggtgccgacaattaacgcgctgcctgtcaatccaaatattaagctggagcacacggctttctatcttcaggaacaaacaaagccatggcatcgcttgaatgatcctgaaactggaaaacaattgcctcgcagaagcatgatcaattccttcggagcggggggagcctatgccaatcttattatagaagaatatatggagacggcccctgagaaagaacatatcgctctccgccagcaggaattcactgccgttttttcagccaaaacaaaatggagcctgcttagctatctagaaaatatgcaattgtttttagagaaggaagcttctctggatattgaacccgttgtacaggctttacacaggagaaaccataatttagagcatagggctgcatttacagtgacatcaactcaagagctgatcgaaaaactaaaggtgttccgaacatcaagagaaagctcactccagcaaggcatctatacatcattcgatttacagccatgtccggaatcagcatctaaggatagagaaataaacgcagcagagcaatgggcacaaggggcatcgattgcttttaaagaagctgatatagggaaccgaacaggctgggttcatctgcctcactatgcatttgaccataatacatcatttcatttcgatgtatcgtctatcaatgagaaatcgtcagatgttgaagacaatatcaatcagccggtcattcaagagcaattcacttatgatgagccttacgttcaaggacacgtcttcaacaatgaacgggtgcttgtcggtgccacatatggcagtctggccattgaagcattttttaacctgttccctgaggaaaacagcggccgtatcagcaaattaagttatatcagtccaattgtcatcaaacaaggcgagaccattgaacttcaggcaaagccgctgcaaaaagatcaagtcatagaactgcaaatcatgtatcgcgagccgtcctctggtttgtggaagcctgccgcaatcggacaatgcggaatcggttcttttgagcccaaaaaagtcaatatcgagaacgttaagcattcattaactaagcttcatcacatcgatcagatgtataaaaccggaaacggtcctgaatggggagagttatttaagacaattactcatctctacagagatcacaagtctatactggcaaaaattcgcctgccccaaagcgggctggcaaacgggcaccattacactgtaagcccattgatgacaaacagcgcgtacttggctatcctcagtttcttagagcagtttgacatgacaggcggcttcctgccgtttggaatcaatgatatccagtttacaaagcaaacgataaaaggggattgctggcttttgattacattggttaagaatacaggtgacatgttgctgtttgatgtagatgtgatcaatgagtcgtcagaaacagtgctgcactactcgggctactcgcttaaacagcttcgtatttcgaatcaaagaggaaatgaaaataaggccatcaaagccagcgatctgaaagctcgtatcagaagctatgtaacagataaactggcagtaaacatggccgatccgtcaaaattgtctcttgcaaaagcgcatatcatggattttggaatcgattcttctcaattggttgcactgacaagggagatggaagcagagacaaagatcgaattaaatccgactctgttttttgagtatccgactattcaagagctaatcgacttttttgcggacaaacatgaagcatcttttgctcagctgtttggtgaagctcatcagcaggaagaacgcctagctcaaatcgaaaaccaaatgaaacagattccggcatacgagacgaacacggataaaacaatcgaacacgcggcagacggcatagccattatcggcatgtcgggacagtttccgaaagcaaacagtgtaacggaattttgggataaccttgtccaaggaaagaactgtgtctctgaagtgccgaaagaacgctgggactggcgcaaatatgccgcagccgataaggaagggcaatcaagccttcaatggggcggttttatagaaggaataggtgagtttgatcccctgttttttggcatatcgcctaaagaagcggcgaatatggacccacaggagtttctgctcttgatacatgcatggaaggcgatggaagatgcaggcttaacagggcaggttttatccagccgcccgacaggagtatttgtcgcagccggcaatacggatacagctgtggttccttccctaattccaaaccgtatatcctatgcacttgatgtaaaagggccaagtgaatattatgaagctgcctgttcctcagctctagtggctttgcacagagctatacaatccattcgaaacggcgaatgtgagcaagccattgtcggggctgtgaatttgctgctttcaccaaaaggctttattggcttcgactcaatgggctatttgagtgagaaaggacaggccaaatcctttcaagcagatgcaaatggctttgtcagaagtgaaggagcaggagttctcatcattaaaccattgcaaaaagccattgaagattctgatcatatttattcggttattaaaggttcaggtgtatcgcatggcggcaggggaatgtcacttcacgcgccaaatccggccggcatgaaggatgcaatgctgaaggcttatcaaggagcgcaaattgatcccaaaacggtgacctatatagaagcgcatgggatcgcctctccattggcagacgcgatagaaatagaggcgttaaagtcaggctgcagtcagctcgaattggaacttccacaggaagtacgggaggaagcgccatgttatatcagcagcttaaagccgagcatcggacacggtgaactcgtctcaggcatggctgctcttatgaaggtcagcatggcgatgaagcatcaaacaataccaggcatatccggattttcgtctttgaatgaccaggtgtcattaaagggcacccgtttccgagtgactgccgagaatcagcaatggagggatttaagtgacgatgcaggcaaaaaaattccgcgcagagcgagtatcaacagctatagctttggaggcgtaaatgcgcacgtcattttagaagaatatattcctttaccaaaaccaccggttagtatgagtgagaatggtgcccacattgtagttctttctgcaaagaatcaagacaggctaaaagcaattgttcaacagcagcttgactatctgaataaacaacaagaactgtcattacaagattatgcttatacactccaaaccggccgagaggaaatggaagaccgcctggcgctcgtcgtccgcagtaaagaagaactggtaatcggcttgcaagcctgcttagctgcggaaaaaggcgataagccgaagagttctgtacctgtctttagcggaaatgcagaaaatggctcgtcagatctcgaagccttgctggatggtccattaagagaaatggtgatcgagactttgttgtctgaaaacaaccttgaaaagatcgcgttttgctggacaaaaggggtgcaaatcccatgggagaagctttatcaaggaaaaggtgcccgcagaataccgttgccaacctatccatttgaaaagagaagctgctggaacggctttcaagcagtagagaatacgccttctgtttcacaggatgagcgtatcaacaacagcagcgatcatcacatattagcaaatgtactagggatggttccgggtgaactgcagcctcataagccattgcagcagtatggatttgattcaatttcttgcatacagttattacagcaattgcaatcaaaggtggaccctctcattgccttgacggagcttcaagcatgccatactgttcaggacatgatggacttgatcgcaaagaaaaaggaggatacatccttacaaaatgatcaagctcgcacgtttccggaattaataccgttaaatgacggcaagcgggggcgccctgtcttttggttccatggcggagtaggaggagttgaaatctatcagcaatttgcacaaaagagccagcgccctttttacggcattcaagccagaggattcatgactgattatgctcctttgcacggaattgaacaaatggcttcctattatatagagatcattcgatccatacagcctgaaggtccttatgatgtaggcggatattccttaggcgggatgattgcatatgaagtcacacgccagctgcaaagccaaggccttgctgtcaaaagcatggtgatgattgactccccatatcgttctgagacaaaagagaatgaggcatctatgaaaacgtcaatgctgcaaacaattaatacgatgctggcatcgattgcgaaacgggaaaagcttacggatgttctcatcagccgtgaagaggtggacataagcttagaggatgaagaattcctggctgagttgattgacttggcaaaagaacgagggctaaacaaaccagataagcaaatacgtgcgcaggctcagcaaatgatgaaaacacagcgcgcctatgatttggagtcgtacactgttaagcctctccctgatcctgagacggtaaaatgttattatttccgcaacaaaagcaggtctttctttggtgatttagacacttatttcactttatcaaatgaaaaagaaccgtttgatcaagctgcctattgggaggaatgggagcggcaaattcctcatttccacctggtggatgtcgattcaagcaaccacttcatgatattaaccgaaccgaaagcgtcaacagccatgttagaattttgcgaaaagctctattcaaacaggggagtagtgaatgcgaatttccttaaggctttccggaagaaacatgaagcgagggaagaaaaagaaacagatgaattggtgaagcgctgagaaaacacaaacgccccctcttttaaaagggggcgttttgaatgttattttgaaagtgaaacagggagactttctaatcctcttaaaaagacattttttctccattgaatgtcatcaggtgcaaccgcaagttcaatatcaggaaatctcttcaaaagtgcgttaaatgcaatgtggccttccagcctggcaagaggcgctcctaagcagaaatgaatgccaaaaccgaaagaaatatgtctgttaggcgaccggtttatatttaatatttcggggttctcaaaaaaattcgggtcgcgattggcagatccgatccctataaaaatcatgtctcctcttttgatcgaatgccccttatatgtaaagtcttcgatggcccaccgatttgccatcataacgacaggtgaggtgtatcgcagcaattcttcaaccgctgtagcgatcatttcaggctgctgcttgagcttctcacattccttcttgtgctgcagcaatgcgagggtgcctgagccgagtaagttaacagttgtttcaaggccggctacaacgagcaagaacagcatcgaatagagctctttttcgcttaacttgctgccgttttcctcagcatgcacaagtttgctgattaaatcgtcttttggctttattcttctgtcatggatcagcttggcgatataatctttaaattcacgaagagcctgatttgtcagctctctattaccttcagaggtatcaaccatcgcattggtccagatttgaaactgtgaccgatcttcttttgggattcccatcaattcagatataacaataaaaggcaaaggggaagcgaaggatttcatgatatccgctttattttctttttccatttcatctaaaagctgttcagcaatttgttcaatgctgccgcgcagattttcaatggttcggggagtaaatgcttgatgaacaagtgatctcaggcgggtatggtcaggtgtgtcttttgccagcatatgatcggatacaaaatcgatatcttcactaacgttgagcattttgatttgttcttggttcatcacattttttacgtctcttgtaattcgattgtcttttaaaaaggccatacaatcatcgtatcgggtaattaaccaggccggatatgtggctccgaaccgttttaattcaaatcggtgaatgggctcttcctctctaaatcgtcctaaaactgaaaaaggattgtgatgaaactctttaccatgcggatgaaacatcaatttttccatttgcattctcctcgcctaatagggtaaatagatgaatcaaattgctgaattagtttacaaaaaacagaatgatttgaaatgtaatcctgtctctaaaactatatatctatcttaggcgtcattcaatagggagaagaacgaaaaaagtgaaaaaacggctcgatataaagcagcgcctttgaacgaaagctcaaaggcgctacgctgtattattttgatgaaagtggctgtcagctgtgctggatatcaattgtatatactgcacgatctgttacgaccttcaatccttcgttttcttggtgaatatgaagctcacctaataaaggaatctcataggcattttgcggaagcggtacgtttccgtcctcagtgaatgttgttccttcgccttctaaaacaagctcttctttcgcaacataatcatcaggatgattcgtactgcgtatagccactttttgaaggtggagaacaatctgatccaagtctgatatctcttcatcatgggtcaattcaccttttctaatatcaagcgtctggccgacttttgattccagccattgagaaagctgtgtattcgtgtgtgccatcaatattcctccttttgatctacacgatactattcccaattgctgcatcttttacacgggaaagagccgccccactctttatgtatgaaacagttcgctgttgagtgccttgatatagcgtacggcagaacgctggaccgattcgtcggcattttctttgacaactttagagaaagcattgtaaagccggttgaattgaagcggttttactttggctgctatttcttcaactttggaggcgggaaggggaatgagatttgggtagctgtacataaagctgacccagtttcgatccgccgcaaccgtaatgatatctccggtcaatagacagcctttcccttcattgcccttgctccaatgcaaaacagcaccgcctttaaaatgtccgcccagtcggtaaaggtccagtcccggcttcatattgagcgtttcccctgaccagaagtgaatgtgattgcttggccttgtcacccattctttatcatcctcatggatatagatcggcgcctgaaacgcttcagcccactcaacctgagtagagtaataatgtggatgagacaaggcgatggcttgaataccgcctaattcgttgatttggtcaattgtcttttggtcaagatatgtcatgcaatcccacagcacattgaagcccttatgctggataagatgggctgtttgtccgatcgcaaactctggttcagttttgatgctgtaaagatgctcttcttcctttttaaggatgttttgaaggtttcctttctcacgcatgtcttcaagggttgtccaagtttgtccatcgggatgaatatactgtctttcatcctcgcaaatcagacacgagttgggcggatctactgtctgtgcatgttgcacaccgcatgtgttgcagatataataaggcactttcttcacttccttcatctattttccattattttaccttatgattatgaatattcaaacaaaaggccggcagttctgctgagagagaattgccggcttttgatgatgtttattggccgggaacggaattttctgcgttgacagcgcccgctccgtagatattcggatcttcatctttccatttgtccgtgccgtttttcaaaagctcttttacttcatcaggggtaagatccgggttttgctgaagaattaaagctgcgattcctgcgcaaatcggtgttgccatcgaggttcctgacattgtaaagtactgagaccctacacggcttgacttttggagcttatcaatataagaattcggagagcgaagggaaataatattaacacccggcgctaaaatatcaggcttttctttcccatatactgtcgggccgcggcttgagaaggaagcgacagtatcatcatcgctgcttgcagtattgttatcgtcaagcgcacctactgtaatcaccttttcgctcacgcccgggcttgcaatggtctgcgaatcagggcctgagtttccggcagcgacacagacgacaatccctgcgctccacgcttcctcaaccgctctgactaacggatcttcctgttcatgatcatatctaagggcatcgcccccgagcgacatgctaataatatcaatcggttcatcggggttgtcctcattgtattgaatacaccactcaacaccctctataatatctgctaacgttcctgaaccctgcttgtttaatacctttacgccaatgagattggcttccggtgcagggccgcggtattgaccggaagaggatgcgccgctgcttgcgacatcacctgcacagtgtgtgccatgaccattatcatcgtacggctctgttttttgattgaccatgtccgcgaatccgataattctgccttctagatcaggatgcgggtagattcctgtatcgacaacagcgacagtaacaccttttcctgtcagggtttgaccgtttctgacgacttccttcgcatggcttgcttcggttgccgtgtctaaaagcgctttgacttcgcggtttaaatacactttacggatattgctgcattcagagagaagggaatgtaatgctgaaggagtaacttcggcgctgcagcagttgattttgttgaagcggctttttagcttgctgcgtttttctttttgcagcacctctccagctatttgaaggccggtctcgtgacagccttcctcaaattcgataatgactgacattttttttctgttttgcaatttggtttcgaaaaatttatgcaagaagcaaggagtccatttgaagggcttgtaaagctgcaatacggtttcccgtaacggccaatctagcttgtgagcatttgctctcaccatttgtaccatagagtacccaaacatgtattttcctcctattataaggttctctgtatactctatgaacagatgataggtttggtaagtttgtttgtcctctgtaagagacagacaagagtttgtttttctgaatctttcgcattagatacgatagattcagaagctgaggaaatcattggggattgaaaaagaacgtttgttcgtattataatgtgatcatatcaaactgggaaggggagagcaaccgtatgaatttctacttgcaccgatctttggaaagccaaatgccaatcagcattatatatatgaagaaagacggaacgattagtaaaagaacgattattgtgagacagaaaagcaaaacgaaaatcaaagcattttgtttttcgaaacaacaaatcagaacatttttattggactctatcctctcctgtgactttgtgagaacaaataagcaaaatctctattctgcaggccggtaacagctgtccgtctcagcaaccgggcagcctgttactaaaaccctccttaaacctatatacatttatttgccaagtgaggttgttcctaccttttttgtctttcctctcaaccttttttcactcttatttgaaatgaaccgctaataaccgtgacaatcaattgattttttgaaaccgggaactttttcactgatgatattgtgtatacaatggtaagataaaacctattggctaaacctcatataatgaaccgcgccattcttatgaaaggagttaaacatgagaagatttttactaaatgtcatattagtcttagccattgtcttgttcttgagatatgttcattactcattggaaccagaaccatcaaatcagccagatacatattcaaatttcagcagcttggcagagaatgagagcccagccgattacgatatttcatataatgagaaaaaaggaagcaaagtcttaattatgtctccgcatggcggaagaattgaaggcggagtaagtgagcttgtgcgttatttcaataatgaatactctacatacctatttgaagggttgaagtcccatgataaccaaacactgcacattacaagcaccaactttgatgagccattggcaaaaaagaaaatcaaggagcatcaatatgtggtggcttttcacggatataaaggagagaacaagaatacccttgtagggggaacagaccgaaagcgggcgaaaatgattgtgagagcccttgagcggagagggttttccgctgagttagcgtcgtctaaaagcggtcttgctggattgaatgccgaaaacattaataaccaaggggaaacggggctaagtatccagctggaaatcagccgtgagcagagagaagcattttttgatgatttttattataaaaatagaaaatacacaaagaacagtgaattttatgcttatgtcagtgcgatcaaaggtgtcctggaaaaagagtattcgtaacaagcagatcagaagacaaaataagagaagatcagtagactgaaataggataaaaaaggaggcaaaacaatggcagatcatcatttttatttaaaagcgaactggccgggtaaccgtaatgatgtcggtacgatcgaaagcggaaacctgatcacatcgatttccattcctaaagaaatggatggcccgggagaagggaccaacccagatgaaatgcttctcggggcggcagcgacctgttacattattacacttgcagcgatgatggagagaagcgggctggaaaaagaagacttacagatggagtcagaaggcattgtcaacgttacaaaaggagtctttacatacaaaaagatcattcaccgtccctctgtcgtgcttaaacatgatgcttcacaagacgacgtcgcattggcgcacaaactttgtaaaaaagcggagtcgtcatgcatgatttcgcgtgcaattcaaggaaatgtcgagctgcagcttgaagcctctgtgaaactgggttgagaataaagaaaacagacggtcactcacaggccgtctgttttttatcttcagcgtgggctttcgattgatttagcacgaccacgcctgcaatgacaagcgtgagaccgaatacaccttttaaactgatggtttcgccaaaaagcaaaaacccgacaattgctgtaagcgcggtaccaacgcccgaccatgttgcatacgcgcttgataagtcaattgtttttaaagaaaagcttagaaacgtaaaagcagaaagaaatccgactatgactccggcaatgggccaggcttgtgtaaatccttctgaaagcttcaacatcgtgctcccaaacacttcagatacaatggcgagagccaaataaagcaatcctctcatcttcatcactcctttacggccaattaagtaacacgacccctgatagtaataaaagaatcccgataagccctttggcattcagatcttccttgaaccattttactccgatcactgtcgtcagcaccgtgcctgccccgctccaagtcgcataggagaggctcaggggaatatggtttaaagtcagggacagcatataaaaggcgagggaatagccaataacgaccaaagcacttggcttccactttttgaagccatcagatactttcagcatggctgctcctatcgattccgaacatatggcaatcgtgaggaatatatatcctatcaacatcatgaattctcctcactatatttttagattagaaaaaaacttcagctagaaaaatattagtgtatgcctatgtatgagtcaagagattcattttcacacacttaaaaagacccctttttaaggggccttttgcgtttaataataataagggaacggggcatacggataataggggtatccgccatacaaataaggattaaataaagcgcttcctataagcccgcctgcaaggccgccgataaacggtcctccaaaaaatccgaatggccggccaaacccataaccaaatccgggtcttccaaatccgtaaccgaacccgaacggtcttccaaacccaaatggtctcccgaatccgaacggtcttccaaatattcttgtatcttcagggctgaaatgctctaactcgttcatgttttctttcctcctgtaataaagtgtagatgatgcagtgtattcaccctgcccggatttgattgggcgaatcgaggaaaaggaggatgtgaacacattgggcctgtatcagtctgactggtcaaaagcaccgccccacgcacatgcctatcatgtcaaaacaacgagagaacagggccattatcatctcattgaagggtttactcagccggcaaacggatcaaataccgatcagcatacacattactatacagggatcacttcatttgaaaacggccattttcatcggtattacggaatctcagggccggcgattcccttagcagatggcacacattatcatgaaatcgaagaaacgacatatctggcctataacgagccaattgagatccagtacggaggggttgtgtacgatcccggagatgacagaagaaaaacgcatcgtcataccctgaaaggaaagacaagggaaattgtcggcaatgagccgctcggctggtagaaggatgtttaccgatgcaaaaaaagggcaaaatggataggtggttgtccatgttgaatgctataatgggggggagatttataaaagagagtgatacatattgaataatacgaagcagcccgttgtcattttagtcggaccgacggcagtggggaaaaccaatttaagtattcaactagccaaatccttaaacgcggaaattatcagcggagattcgatgcagatttataaagggatggatattggaacagctaaaattaccgaacaggagatggagggagtgccccatcatctgattgacattttagatcccaaagactctttctctactgccgattatcaaagcttagtaagaaataaaatcagcgagattgcaaatagaggaaagcttccgatgattgtcggcggtacagggctttatatacaatctgtgctttacgattatacatttacggaagaggcaaatgatcccgtgtttcgagagagcatgcaaatggccgctgagcgggaaggcgctgactttctgcatgccaaacttgctgcagcagatcccgaggcagcagctgcgattcatccgaataatacaagaagagtcattcgcgcactggaaattttacatacgtccggaaaaacgatgtcccagcatttgaaggaacaaaaacgagaacttctgtacaatgcagtgttaattggcttgacaatggatagagacacgctttacgaaagaattaatcagcgggtcgatttgatgatggagtcaggccttcttccggaagtgaaacgcttatacgacaagaacgtgagagactgtcaatcaatacaggcgataggctataaagagctgtatgcatattttgacggttttgtgacactttccgatgctgtcgaacagctaaagcagaactcgaggcggtatgcgaaacgccagctgacgtggtttcgcaacaaaatgcaggtcacatggttcgatatgacaccgcctgttgatatggagctgaaaaaaaaggaaattttcacacatatagcaggaaaactcgaactttaatcgaaactgtatgatatagagaatcaaggaggacgaaacatgaaaccgattaatattcaggatcagtttttgaatcaaatccggaaagaaaatacgtatgtcactgtttttttgctgaacggctttcagttgcggggccaggtgaaaggctttgataactttaccgtattgttggaatcggaaggtaagcagcagcttatatataaacatgcgatctcaacgtttgcgccgcaaaaaaacgtccagcttgaactcgaatagatcaaaaaatgccatgtcaagacatgaggaaaggctgccgggggttcccggcggccatttttaacatgaatccacttttgctccaagctttttgtgtaagctgaccatgccaaggcacggtctttttttatgagaacaacatacggaagtgaaaatggtatattatgtataaaatgaatttgggagtgatcgaccttgtttgaaagtgaagcagaactgagacgaatcaggattgcacttgtatggatagctgtctttttactgttcggggcgtgcgggaatcaagataccattattgaaacagacagcggcaattcagactatgaaacgcctcagcccacctcgtttccacttgaacataaccattttggcgttatggaggacggctatatcaaaatttatgagtataatgagtcccgcaatgaggtaaagctgaagaaagaatacgcggatgatgagcttgaataaaattcacaagcattcgaatttacaaagcggattccagccgctaaactaaatacagacacagatcaaacagagggtgaaaacatgaagcataaagtgatcgtgaatcattgggaagaaatttgcgaagatgattcttgctatgaatacggaacaagtatcattgtgaacggaaaagaattaatcagagaagcgtcaattatcactgctttgaaggcggttttagaagagatcggcgcggatgttgaaatagaagaaacagtagagagcgaaaaatgctgtgatagcttaagaaaaaaaaatctagactactaagcagttttttttcatgttatgataaacatcggctaaaaaacgacaccccgagtaggatgagagatgattctcgttctgctctcttttttgggccctaatgagtctgcccatttgcctgatttgatcaaaatatgaatttttcataaaaacgaatctatatattgtgtttttgctagagggtagtatactgtatatagtgttagtgatgagagattcatattttttgataggtcgtgataaaacgtggtacaaatcatatttgattcgaaaacagggaatgttcagcggtttgtgaataaaacaggctttcagcagatacgcaaggtggacgaaatggaccacgtggacactccgtttgttttggtcacctacacgacaaacttcggccaggtaccggcatcaacacaatcatttctcgaaaaatacgcccatctcttattaggagtcgctgcgagcggcaacaaagtatggggcgataactttgcaaaaagcgccgataccatttcaagacaatatcaggtgccgatcttgcacaaatttgaactcagcggcacatctaaagacgttgaattgtttactcaggaggtagaaagagttgtcacaaaatcaagtgccaaaatggatccagttaaataacgaaatcatgatccaaaaagatggaaaattccagtttgataaggataaagaggctgtacatagctattttgtagattatatcaatcaaaacacagtcttctttcacgatttaaaagagaagctggattatttggttgaaaaccaatactacgaagaggaattcttaagcctttattcttttgaagacattaaagaagtgtttaagacagcttacgctaagaagtttcgttttccttccttcatgagtgcgtttaaattctataatgactatgctttgaaaacgaatgacaagaaaaaaatcctcgagcgttatgaggaccggatctcaattgttgcgctgttcttcgctaacggcgacactgagaaagcaaaagaatatgtaaacctgatgatcaatcaagaatatcagccgagcacaccgacatttctgaacgccggcagaaaacgccgcggtgaacttgtgagctgcttcttgctggaagtcaatgattccttaaatgacatttcaagagcgatcgatatctccatgcagctttctaagcttggcggcggggtttctcttaacctgtccaagcttcgcgcgaaaggtgaagccattaaagatgttgaaaatgctacaaaaggcgttgtaggcgtcatgaagcttcttgataacgcgttccgttatgctgaccaaatgggacaaagacaaggctctggcgcggcgtacttaaatattttccaccgcgatatcaatgattttctcgatacgaaaaagatttcagcggatgaagatgtgcgcgtcaaaacgctttcgatcggtgttgtcattccggataagttcgttgagcttgcacgcgaggacaaagcggcttatgtattctatccgcacacgatttataaagagtacggccagcacatggatgagatggacatgaacgaaatgtacgacaaatttgtcgacaaccctcgggtgaaaaaggaaaaaatcaacccgcggaaattgcttgaaaaactggcgatgcttcgttctgaatcaggctatccatacatcatgttccaagataacgtgaataaagtgcatgcgaataaccatatttccaaggtgaaattttctaacctttgctctgaagtgctgcaggcatctcaagtttcttcatacacagactatgatgaagaagatgaaatcggtctggatatttcctgcaacctgggttcgcttaacattctcaatgtcatggagcataaatcaatcgaaaagacagtcaagcttgcgacagactctttaacacacgtgtctgaaacaactgacatccgtaatgcgcctgctgtaagacgggcaaacaaagcgatgaaatcaatcggcctcggtgctatgaaccttcacggctaccttgcgcaaaacggcattgcgtatgaaagtccggaagcgcgtgactttgcaaacacgttctttatgatggtgaacttctactccatccagcgttctgcggaaatcgcaaaagagaagggtgaaacgtttgatcaatatgaaggctcaacctatgcgacaggtgaatactttgacaaatacgtttctactgatttctcaccgaaatatgaaaaaatcgctaatctgtttgagggtatgcatatcccgacgacagaggactggaaaaagctaaaagcatttgtggctgaacacggtatgtatcacagctacagattatgcattgcgccgacaggctctatctcatacgtccaatcaagtacggcgtctgttatgccgattatggaacgcattgaagaacgaacatacggcaactcaaaaacgtactacccaatgcctgggcttgcatctaataactggttcttctataaagaagcctacgatatggacatgttcaaggttgtggatatgatcgccactatccagcagcacattgatcagggaatcagctttacattgttcttaaaagacacaatgacgacccgtgatttaaaccgaatcgatctgtatgcacatcatagaggtattaaaaccatttactatgcaagaacgaaagatactgggcaagacagctgcctttcttgtgttgtttgattaaaggagagtttatagtgacaaaaatttatgacgcagcaaactggtcaaagcatgaagacgattttacccaaatgttctataaccaaaacgtgaaacagttctggcttccggaagagattgctttaaacggcgatctcctcacatggaagtacctcggaaaaaatgagcaggacacttatatgaaggtactggccggacttacgcttcttgacacagagcaggggaatacggggatgccgatcgtggctgaacacgtagacggccaccagcggaaagcggtgctgaactttatggcgatgatggagaacgctgtccatgcgaagtcgtactctaatattttcatgacccttgcaccgactgaaacgattaatgaagtatttgaatgggttaaacaaaataaatatttgcagaaaaaagcgcaaatgattgtcgggctttacaaagccattcaaaaagatgatgaaatttcactgttcaaagcgatggttgcttccgtctatctggaaagtttccttttctacagcggtttctattatccgttatatttctacggacaaggaaaactgatgcaaagcggtgagatcattaacctgatccttcgtgacgaagcgattcacggcgtgtatgtcggtctccttgctcaggaaatttataataaacagacagaagagaaaaaagcagagcttcgtgaatttgcgatcgaccttctgaatcagttatatgaaaatgagcttgagtatacagaggacttgtacgatcaagtcggactctcacacgatgtaaagaaattcatccgctataatgcgaataaagcgctgatgaatcttggatttgatccatacttcgaagaggaagatattaatccgatcgttttaaacggattaaacacaaaaacaaaatcacatgacttcttctctatgaaggggaatggttataaaaaagcgacagttgagccgctcaaagatgatgacttttattttgaagatgaaaaagagcagatataatatctgctcttttcggcttgaaggttcaaatgaggaggacgcagtacccatgggaaaaatggacgaaatgattttagttgccccacgcgatgatgtgtttaaaaaagaaagcttaaccttccagggcgtgtacagtgaagatagcagagtagccgaaatcatggctcagattgaagcggcctatcgtgaaatgagaagaggggacgcagaagaagatccgcgtttcaagcagccgataccttatgtcgtcattaagcgtgaagatgaagtttttctttacgagcggctggctggcggcggtgaatcacgactgcacaacaagctttctctcggctttggcggtcatatgaacgccatcgaaggggcagcttcatttgctgaagtcttaaagctgaacacagaccgtgagcttgaggaagaactgcaaataaatgaagaagataaacaggcgattgtcacactgggattgatcaatgatgatgaaaatagtgttggcaaagtgcatatcggtattctttctgcgcttcaattaaagcctggcgcacaagtggaagtgaaggagaaagaacaaattgcgggtaaatggatgaaagtttctgaattaaaacaggatgacatctacaaccgtctggaaacatggtcacagtttgttgttgatattcttgaataaaaaaacccggtttctcgcgatgaggagccgggtttttttatgagacgctcgtccccgtctcggctatgattctaggatcacaatagcgtcaaagccggcatttttcgctctggcagcgagagtgtctgcattgtcattggatgaaaatgcgccaatctgcactttgtaaaatccgtcctttaaaaggacaatcgagtcaaaacctttggcttcggcattacttgcgagcgagtcggcattcgctttggctttaaatgcgccgatttgaaccttatataaccctgagctggaagtctttttaaggttaaaggcttgctccagcccgtttgcatgtcctctcgctaagctttgaataaaactgctcgttttcagcttatttgcatcggaaacggtatcaatgaagccgttctcggtcaagagggcaggcattgccgactcccttaggacgtggaagttcgctgtttttttgccgcgatcggcaaagtcgacagcttgtatcacttcagagtgaattgccgattgataagtcgtcgtcggggctcctacatctggataaatatagctttcaaaacctgtgcctcccccggaattaacgtgaatggacaaaaagaaatctgctccccagttatttgcggcatttgtccggtcgtttaagctgacatattggtcgcttgtccggctcagcagcagagaaacgccttcatattcattagttaatatcgtacgtaaggctaaagcgatttgcagggttaacgttttttcctgaaggccattacctgttgcgcctggatcagacccgccatggccaggatcaataaaaattttaaccatttttcatcacctcattacaggatatgaaaaaacacagcttctgcttgtacgattatcattcaactgaaaaatgaggaaataaccctttcacatccagaaattatttctcgggaaagcgcacaattcaacatgaagcgacaacagatacggtccgacatgaaatctgtgcatacgccatatgtttgtatgtactttgagttcggttaacctgcactgattcctgttggttttaagctttgcgttcatattaaatcaagcatttgaaacgtaaattgatgagaaaagctcctttcattaaagacaccactttataaatcgaaaaaaagaaaaacacttcaggtatcttagggcgggtaatacgcttcgtacaaaaaacagcccgttgcatgaaaaaaggattggcgaatggagaaaataatgagaaagaagctcactataatactttgacaaaatgattaaaaacaaaatctcatggtttgtccaccccatgtccgtgaatacaataagaaataaagtatttctcgggaaagcgcaggattccttattgttcccgaaaaaagcaattgtttcgacacatgataggcgtttgtcacaatcggcatccgcttgaatatcatatagagagaacagagaggtgaagatgttggagcgcgctgtgacttataaaaacaacggacagatcaacattattctgaacgggcaaaagcaggtgctgacgaatgctgaggcagaggcggaatatcaggctgcattgcaaaaaaacgaagcaaagcacggcattttgaaggaaatcgaaaaagagatgagcgcattagttgggatggaggaaatgaaacgcaacatcaaggaaatatacgcctggatttttgtgaaccaaaaacgcgcggagcaaggcttgaaggttggaaagcaagcgctgcacatgatgtttaaaggaaatccgggaacgggaaaaacgacggttgcacggctcatcggcaagctgttctttgaaatgaatgtcctgtcaaaaggccacttaatagaagcggagcgggctgacctggtcggggagtatatcggacacaccgcccaaaagacgagagatttaatcaaaaagtcattaggtggcattttgtttatagacgaagcctactcgctggcaagaggcggcgaaaaggactttgggaaagaagcgatcgacacacttgtaaagcatatggaagacaaacagcatgagtttattttgatactcgctggatattcacgggaaatggatcattttctctcgttaaatcccggtctccattcaagatttcccatctccattgattttccggattactctgtgacccagctcatggagattgcgaaacgaatgatcgatgaaagggaataccagctcagtcaagaagcggaatggaaattgaaagattacttaatgacagtgaaaagcacgacaagccccattaaattcagcaatggacgttttgtcagaaatgtgatcgaaaaatcgatcagagcacaagccatgaggcttttaatgggagaccaatacttaaaaagcgacttgatgaccatcaaaagccaagatctttccattaaagaagaagcatctggatctgcatagacctctcagtttttgagaggtctgttttttgctcgtatttccgcttttcaaagcaatcgatttgtggtatacacatgcagggtttggtatgataatactactgcccaatatgcaaaagaaaggaacatccatttgaacgaacaagaaacgattcaggagaaagccattttagtcggatgtcagctgccgcatatcacggatgagcattttgaaaattctatggaagagctagcatctctgacgaaaacagcagacggaaaagtactgaccagcgtcacacaaaaacggaacagggctgacgccgctacatatataggaaaagggaaggtagaagagctgaaggcactggtggaagagcttgaagctgatctcctcatctttaatgatgaactgtcgccaagtcagctgaagtcattggcaacagcaattgaagtgaagatgattgaccgcacgcaattgatattagatatttttgcaaagcgggcgagaacgagagaaggcaaacttcaaattgagctggctcagctgcaatatgcactgccgcgtctgacgggacaagggatcaacctttcccggcaaggcggaggaattggggcaagaggtcccggggaaacgaaactggaaaccgaccgccgccatatcagaaatcgcattcatgaaatcaacacacagctttccactgtcattcgccatagaagccgataccgtgaaagaagaaagaaaaacggtgtgcttcaaattgcgcttgtcggctatacaaacgcagggaaatcaacatggttcaaccgcctgacgagtgctgacagctatgaagaagacctcctgtttgccacgctcgatccaatgaccagaaaaatggtcctgccaagcggctacagtgttcttctttcagatacagtaggatttattcaggatcttccgacgacattgattgctgcattccgctcaacgcttgaggaagtaaaagaagcggatttgatcctgcatttaattgattcttcaaatgaggattatgcgggacatgaaaaaacagtgcttgggcttctcgaggagcttgaagcagatgatatcccgatgctgacggcttacaataaacgtgatcaaaaactgcctgattttataccgtccgccggaagggatcacattatggtcagtgcgaaatttgaggacgacgctgcagcctttaaagaagcgattcagcgctatttgcgccaagaactgttaacgtcttttgaagcacatgtgccggcaagtgaagggaagctcctttccagaatcaaatcggaaacgatgatagaccgcttctattttaatgaagaaaatgaacagtatgacatatccggctatgtccaagaagagcaaagtatcatcggtgaattaaagaagtatatgtaggaaggaaaaataaagacatgtttgacacattaacacacggagaattattgaagaaaacggcaatggaagtggaagcggacattgccggcattcataaacaaatagaagaaatcagcgagcgaaatgagtggagagtgcttcaaagctatagaaaacacaaagtaagcgacactcatttcacgccgtctactggatacggctatgatgatatcggaagagacacgcttgaaagcatatatgcggatgtgtttggcggagaagcggggcttgtaaggccgcaaatcatttcaggcacacatgccatctcaattgctttgttcggtgtcctcagaccgggggacgagctcctttatatcacgggcaagccgtatgatacgctagaggaaattgtgggcgtcaggggtggagaaaacgctggttcgttaaaggattttcaaatcggctataatgcggttgatctgacgaaagacggaaagatagactatgatgcagtcgccgctgcgatcaatccgaagacaaaagtaatcggcattcagcgctcaaaaggatatgcgaatcgcccttctttcttaattagtgaaataaaagaaatgatccgttttgtaaaagaaatcaatgaaaatctgatcgtctttgtggacaactgttacggagaatttgtggaagagcttgagccttgccatgtcggagccgacctgatggcgggatctctcattaaaaatcccggcggcggccttgcgaaaacaggcggctacctcgtcggaaaagcgaaatggattgaagcttgctcataccgtatgacgtcacccggcatcggcagagaagcgggggcatctctttactcgctccaagaaatgtaccaaggcttctttttggcgcctcatgttgtgtctcaaagtctaaagggagcggtgtttacagcgagattccttgaaaaactcggcttcacttcaaacccgaaatgggatgcgaaaagaacggatttaatacaatccgttgagttttctgacagagaaaagatgattgctttttgccaggctattcaatttgcatcgccaatcaatgctcatgtgacgccttatccagcctacatgcctggatacgaggatgatgtcattatggcagcaggcacgtttattcaaggagcaagcatcgaattatcagctgatggccctatccgcccgccgtatgtagcgtatgttcagggaggattaacctattcgcatgtgaagaatgccatatgcagtgcagtggattcattgatggaaaagcaattaatttaaatttttaaaaatttctctggatttgatgttaagaatccttacatcgtattgacacataatataacatcacctataatgaaactaagttaagaaaaggaggaaattgagatgagtgataatattcgccgctcaatgcctttatttccaataggaattgtcatgcagttaactgagttatcagcaagacaaattcgatattatgaggaaaatggactgatatttccagccagaagtgaagggaatagacgattattttcatttcatgatgtagataaactgttagaaatcaagcacctgatagaacaaggtgtaaacatggcaggaattaaacaaattctggcgaaagccgaagccgagccagcacaaaaacaaaacgagaagacgaaaaaaccaatgaaacatgatctgtccgatgacgaactgagacagctcctgaaaaacgagctcatgcaagccggccgttttcaaagagggaatacattccgtcaaggcgacatgtcccgcttctttcattaatccgttagcaactgttttgctatatacatttaccttttaagaggaggaattttaccaaatggcaaagtacactagagaagatatcgaaaaattagtaaaagaagaaaacgtgaagtatatccgccttcaatttactgacattcttggaacaatcaagaatgttgagattcctgtaagccagcttggaaaagcgcttgataataaagtcatgtttgacggttcttctattgagggattcgttcgtatcgaggagtcagacatgtacctgtatccagatctaaatacatttgttatcttcccatggacagctgaaaaaggtaaagtagcacgtttcatctgtgatatttacaatccggatggcacaccttttgaaggtgacccgcgaaacaacttaaaacggattttgaaagaaatggaagacctcggatttagtgattttaaccttgggcctgagcctgaattcttcttattcaaattggacgaaaaaggcgagccgacgcttgaactaaacgacaaaggcgggtatttcgacttagctccaactgatttaggagaaaactgccgccgcgatatcgtgcttgagcttgaagagatgggctttgaaatcgaagcatctcaccacgaagtagcacctggtcagcacgaaattgactttaaatatgctggagcagtccgctcttgtgatgacatccaaacatttaaactagttgtcaaaacaattgcccgcaaacacggcctgcatgcgacatttatgccaaaaccattgttcggcgtgaacggttctggtatgcactgcaatctatcactcttcaaaaatggtgttaacgcattctttgatgaaagcgcagatcttcagttaagtgaaacagcgaaacacttcatcgcaggtatcgtgaagcacgcaacaagctttacagcagtaacaaacccgacagtaaactcttacaaacgtcttgttcctggctatgaagcaccttgctatgtagcatggagcgcgcaaaacagaagcccgcttatccgtatcccggcttctcgcggcatcagcacacgtgttgaagtacgcagcgtagacccagctgcaaacccataccttgcacttagcgtattgcttgctgcaggattagacggaatcaaaaacaaactggaagcgccggctccaatcgaccgcaacatctatgtgatgagcaaagaagagcgcatggaaaacggaatcgttgaccttccagcaacacttgcggaagcgctagaagaattcaaatcaaacgaagttatggtcaaagcgctgggcgagcacctattcgaacacttcatcgaagcaaaagaaatcgaatgggatatgttccgcacacaagttcatccttgggagcgcgaacagtatatgtctcagtattaatctctcaatcccttggcactaaaggtgtcaggggattttttatgttaataggtaataaattatggagcggcactgctaaaaagcagggtcacttttagtctatgtcactaataattctatgtactaaattttcaattagggaaataattccacgcttaaggaagcaatacgcataaataattcgacaaattctgtgataattccattgttcaatacttctaccagcaataataagatgagcaaggtggatgattatcattgacatcataaccaaaaaaatccataattacgttgaaatctaaatcaattttcaaaaaggagatttccatgaaaaaattgactatcttttccgggggattaggagtggttttttctgtactggctcaactgtttgcggttatagatgactcttacactttggggaatttatggtttttaggtgctttggcgggaattataaccatgcttgcttcaatccagacaaataataaaccaatcttcagcattttattaatttctagttcagtaataggtctacttggaactggttttgtatacatcataccaacactgttcaatataataataatttataaattttcaaaagtaagccaataagccaatgggaaaattaaggttctttttttatttaacatccctttgacaaggtcggtaatgaatcgcagaatgttgcaactggtccacacagttggggaaatcgtgggcatgattatcgaacgccatgtttctaggataccggaattgaaacatttgctgagtcatttcgtgaagttgatcaccaaatgtccatttcaatagaggcacgtctaaagaagctatcataggaggacaatactgtgtggaaagctttaagtcaattactcaagaaacagaaaaatcaaagtccaagcgatgagggttatatacagattccagaaaaggatataaatcaagaattaaagcaagtgatatttgagttggagagcctgggggaagtagtatcgaaaaagctgcagaataagtatgcaggtgtttttgaagctcaggataaaccaaatctcagcatcaaagtttgtagagacatagatggagatgtgctaaatgattttacagctgagagatgttttgaaaaagaataccgttcacaaatagcaattaattactatcaacctgcaatagtctgtgatgaagaattagcctgtttcacaatggatttgtggtattactacggtggatataaagggacgggttgtggaacattattcgatttaaataataatgacttagaaaaagaaattgaagagacgctaatatttttgctcaatgacaaacaattcgagaaataaaaaagaaggccgcaaagcgctttcaatcaactgatgtagctaagaaaagcgtttaagaattagctgacttgggtgacagcgagttttccgggaagggtgcagacaacattaaagcattttatcatgatcatgccggcattacagatcaatgtatcgatcggattgacatggaaattgctttcttaagcatcatttttgcaaaacttgtagatgcaaagatgtaagatacttacatagaagagtcatttttaaaacatgagctggctaacgattacacaaaatcaaaattcattatgtctgaacaaaagaaaacgatgaaagacattctgaataacaccattgaataaatatcttaaggataaaaaagtgaattggtcaaaggaattgaaatatttaaaagggctattaggctccaaaacgcttgcaaaagatttaaaaatccaaatgaatgtttaagtatttgttttcaggtttagtgataactatgtctatacttaaaattatatccatttgataatccagagagaaaaaccttaatgtcccgtttaataggggaaagaactatgatatctcctagtcaccaatatataagaaatgggacaagcaaagatttgttaggcgcaactttaattaaataaataaaatagcaatcttgtgataatagtagctaatctgttggtacccttgccagcagcttttataaaacgtttttttgactttgagttgctctttcttagtctgataaaacttcttcattagcgtccgcttctcaatctaggatatgtgaaatcctcaatcgcattgcaaattcccgaaaagctttttctgtctttaaatcaagtccaaacttcattctctcggccgtctaagaagctaatttactgcttcttcttttcaggttccatgtaccggtctttacagtgtctgggagaaaaagtgatttggggcattcatctttttttatttcagctagcgaagtgaaagaccgatggcatttttcctgcatataatagctggaactattcaaaaaggcagggaatgaagttgagtgaatgatgtgattgtaaatggaggttttgaaacaggcaatctgacgggctgggcttctgcaaatacgtccgttattaatacttttgcccattctggaagatattccgcacagtttttcagtaaccagccgtatgcttttttagggcagatcgtgcctgtcgtttctggacaatctctgatattcatcgtttcgcttgggagaattggaaacaattcaagtccccaagtaactatacaaattttatttgttaacagtgaaggcgaagagattgaaggcggacaggaaattatcattgcttccggaaatttgccaaatgtctcatttaatacatggaatgaaatatatagaacaattgaaacccccgctgaagcagtaaacgcagtggtggtaataagcaaaactacttttgggtctgttctaattgatgatgtttctttaatagagtctgctgggggaattggaccgactggaccaacaggtgcaacgggagcaacaggcgcaacaggcgcaacaggcgcaacgggagcaaccggagcaacaggcgcaaccggtccaactggagtaacgggagtaacaggggcaactggtgcaaccggatcaaccggatcaaccggatcaaccggagaaacaggatcaacgggagtaacaggggcaaccggagcaacaggagtgactggatcaactggcgcgaccggagcaaccggatcaacgggatcaaccggagaaacaggtccaacaggaccaaccggagaaactggagcaaccggaccaaccggatcaaccggagttactggagcaattggagccactggcgcaacaggatcaactggtgcaacgggagtaaccggagccactggagtaacaggattaactggaccaaccggagaaactggtgcgacgggagtaaccggagccactggagccactggagtaacaggattaactggtgcgacaggagaaactggaccaaccggagcaacgggatcaaccggagtaacaggtgtaacaggatcaactggagtaacaggatcaacagggtcaacaggatcaacaggaccaaccggtccaacaggagtaacaggatcaaccggagaaactggcgcaaccggatcaactggagaaacaggagtaacaggatcaaccggatcaaccggagaaacaggtccaacaggaccaactggtgcaacgggagtaaccggagccactggtgcaacaggaccaactggtgcaacgggagtaaccggtccaactggcgcaaccggagcaacaggcgcaaccggtccaactggagtaacgggagtaacaggggcaactggtgcaaccggatcaaccggatcaaccggagaaacaggatcaacgggagtaacagggtcaaccggagcaacaggagtgacaggtgcaaccggatcaaccggagaaactggtgcgacgggagcaattggtgcaactggtgcaaccggagcaacgggagtaactgggtcaaccggagcaacaggagtaacaggtgcaaccggatcaaccggagaaactggtgcgacgggagcaattggtgcaactggtgcaaccggagcaacgggagtaacaggatcaactggaccaaccggagtaacaggtgtaacaggtgcaaccggatcaactggtgcaacgggagtatccggagccactggagtaacaggattaactggaccaaccggagaaactggtgcgacgggagtaaccggagccactggagccactggagccactggagtaacaggattaactggtgcgacaggagaaactggaccaaccggagcaacaggagtaacaggatcaaccggagaaacaggtccaacaggagtaacaggatcaaccggagaaactggcgcaaccggatcaactggagaaacaggagtaacaggatcaaccggagaaacaggaccaactggtgcaacgggagtaaccggagccactggtgcaacaggagcaacaggagtaatcggtccaactggcgcaaccggagcaacaggcgcaaccggtccaactggagtaacgggagtaacaggggcaactggtgcaaccggatcaaccggagaaacaggatcaacgggagtaacagggtcaaccggagcaacaggagtgacaggtgcaaccggatcaaccggagaaactggtgcgacgggagcaattggtgcaactggtgcaaccggagcaacgggagtaactgggtcaaccggagcaacaggagtaacaggatcaactggaccaaccggagtaacaggtgcaaccggatcaactggagaaactggagaaactggagatacaggaccaaccggagaaactggtgcgacgggagtaaccggagccactggagccactggagtaacaggattaactggtgcgacaggagaaactggaccaaccggagcaacgggatcaaccggagtaacaggtgtaacaggatcaactggagtaacaggatcaacagggtcaacaggatcaacaggaccaaccggtccaacaggagtaacaggatcaaccggagaaactggcgcaaccggatcaactggagaaacaggagtaacaggatcaaccggatcaaccggagaaacaggtccaacaggaccaactggtgcaacgggagtaaccggagccactggtgcaacaggagcaacaggaccaaccggtccaacaggagtaacaggatcaaccggagaaactggcgcaaccggatcaactggagaaacaggagtaacaggatcaaccggatcaaccggagaaacaggtccaacaggaccaaccggtccaacaggagtaacaggatcaaccggagaaactggcgcaaccggatcaactggagaaacaggagtaacaggatcaactggcgcaaccggagcaacaggcgcaaccggtccaactggagtaacgggagtaacaggggcaactggtgcaaccggatcaaccggagaaacaggatcaacgggagtaacaggggcaaccggagcaacaggagtgactggatcaactggcgcaacaggagtaacaggtgcaaccggtccaactggagtaacgggagtaacaggggcaactggtgcaaccggatcaaccggagaaacaggatcaacgggagtaacaggggcaaccggagcaacaggagtgactggatcaactggctcaacaggagtaacaggtgcaaccggagcaacgggagtaactgggtcaaccggagcaacaggagtaacaggatcaactggaccaaccggagtaacaggtgtaacaggtgcaaccggatcaactggtgcaacgggagtatccggagccactggagtaacaggattaactggaccaaccggagaaactggtgcgacaggagaaactggtgcgacgggagtaactgggtcaaccggagaaactggagtaacaggatcaactggaccaaccggagcaacgggagtaaccggagtaacaggatcaacagggtcaacaggatcaacaggaccaaccggaccaaccggatcaacgggagcaacaggagtaacaggagtaacaggtgtaacaggtgcaaccggatcaactggagaaactggagtaactggtgcaactggagatacaggaccaaccggatcaacgggagcaaccggagaaacaggagtaacaggatcaaagggagtaactggtgcaaccggagaaacaggagctactggtgcaactggagatacaggaccaaccggtccaacaggagtaacaggatcaacaggtccaacaggaccaaccggaccaaccggagaaacaggagcaaccggtccaacaggagcaaccggatcaactggagtaaccggagcaactggagcaaccggaccaaccggatcaacgggagtaaccggtccaactggagcaaccggatcaacgggagtaaccggtccaactggagcaaccggatcaacgggagtaaccggtccaactggagcaaccggatcaacgggagtaaccggagaaacaggagtaacaggattaactggtgcaacaggatcaaccggagaaacaggagcaacaggagcaacaggagcaaccggatcaacgggagaaactggcgcaaccggagcaacaggatcaacgggagtaaccggagcaacaggagtaaccggattaactggtgcaacaggagcaacaggagcaacaggagtaactggtccaacaggatcaacaggagtaaccggagaaactggtgcaaccggatcaactggcgcaacaggagcaacaggtgcaaccggatcaactggcgcaacaggagcaacaggtgcaactggcgcaacaggagtaaccggtccaactggagaaacaggatcaaccggatcaaccggagcaactggtgcaactggagcaacgggagtaactggagccactggtgcaacaggatcaaccggagcaaccggtccaaccggatcaaccggagtaaccggagtaacaggtgcaacaggaccaacaggaccaacaggaccaaccggttcaaccggggcaaatccacagctgttttacagtgaaatagcaggccccgttccgcttgctattaacggtactgaaacgtcgattggtactttaagtgtgccaacagtcgcaggacaattaataaaattagaccttgccatttctgtagatgttacaacgacagctaactcaaactttacttttcaaaccagaatttatagaaacggagtattagtagatacacgctccgtccaaagaaatatcagcgctgcaattacgtcaagatttccaattgctacaacgtatgtagatgctaccacggtcacaggcacgacttcttatgagattaggataatcttcacaacagtaagtaatgtgagtggcagcaacgcactaaacctagatataaatgctattaggttcccttaataatagagaattaaaaaatcacttttttaaaaaaattcaagcatatgaaacaagaaacctacttttaaacagtaggtttctttgtcgtggtattgaaaccttatcatgtctcggaatatccctccaaaaattttttaaggtaataagaatactggtctgtatcaaactcgttgccgcatgcatgtaagacccaaggctctttctgatgagggatgcccactatatatcctttttttctgaactcaaaacattgagaagtatcatataaatgccatccgttaaaaatatcttttcgccatggaacatcgtactgagtcgccagtaataaaccgtctaatgcttgaactgctttcacagtttcatcaatttcatcaaataataaatagttgtacgtgctgcggtattcaatgacttttccggcttttttagaagcctcccaccaaatcccgctttgcggcacttcttcagctcctataacgcctatcatgccaagctgatcattctgctgaaagacatggagaatatcataaataaaggaacgattgatgataaatgtgtcctgatgtaaatacactttatattttgagtcagagtcctccattgccgcctggtagccggacgccatactgtctgcgtctcggatattgattaattctaccttcatatgcggcggtacagaaagagactgaagatgtcttagacagagatcataaagggtatcgtcattcacacatgtaataaagctaattgaattttcgtttgtatgctgattcatcttttctctgcctttatgacatattgataggctctggcctcctcctcaagatctgcatggtgaattcccatgcatgatctgacataagcaagtttgctgatcattttttcataataatgagtcgtaaaaacaataggctcgatttggatgatcttgtagcctgtttcatgaaacatctttttcatttcctccaaggtgaaaaaacggaagtgtgttttatcgagcagccctgcctgtatatacgtccatttgccggacagcagactttcgaaaatcgagatatgtccgatattcgggatgcttgccaagatactccctgtttcttttacataaggcttgatgttacctaaaactgcccacgggtctattaagtgctccagaacatcaccgaagataatgtgatcaaatgtgtttttttgaaaaggcagcttcagtgtttcaatgtctcccgttattacttcgtcaatataatgtgttgctttttcggcagctggtggataagactcgatcccataataggagcaattcgttttttccttcacagctgcgccaaacaagccttcagcacatccgacttcaagaatggttttcgcatgcggttctatcagatcaaatagctgccagttgatgcctttgtaatactctttatcttttagctcatactctttcatagaatcagcaagtgaatttttattgatttccatgatgttcacccccggagccggtctgcatctttagaatatcttcaaaatattttttgttggctagcattcttgaatcatggggacggtattgcaatgccgattcattatgctgataggcaagctgatgctggccgagtttatcgtagcagacggctaattgcaggtggggaagccaggtcgcgcaggcgcggttttgaaaagccaggttttctgctcctttgttttctattgctttttcataccaatagaccgcactctgaaaatcgtttttttctaaaaaagagtatcccagcctgcagcaggtttctgctctaggcggtccatagacgagcgtgtggagcacccagcttaattctttttccttcagccccagtgaatggtagcagtctgctaatttattgcacgctctgatattatcctctacccatccctgcttcgtttgtaaaaaacgtaaatagtactcaatcgcttgctccatttttccgtgatcacacaactcgttcgcatagtaaaataaatctcttggagaaaaatcctttcctgacgaggccattttttcataaattcggaggttgcgatctgcgtcatgactaagtggcaggtgagaaaccgctgcatcactgtggtgaagtttcccatatacttctaggtattcatgaaccgcgccgatccatttaaagctcttttcccgttttacgagccggtatctccttaagctggatgtgacgttattttcttcatcaaaagccaaatggtatttcattgagaccgcgtctatatccggatcaagcgttctttttaaatccaataacagctcttgatctttcttggtaaacacgtcgtcggcgtcaagccataagatatagtcggatgtcgcctgctgaaacgaaaaatttcgggctgccgcaaaatcgtcaatccatttaaaatcaaagattcggtctgtatagcgagcagcaatgtctttcgtcttgtcaactgacccggtatccacaatattgatctcatcagctatctcctgcacagaatctaagcatcggccaataacagcctcttcattttttacaatcatgcataaactgattgaaatcacatcgccacctccgttttattctgttttttctttatggcatggacaaacatgtaatcaatatgggcatgttttgacaagtgatccaaagacaaaccaaattgcccggcaaggaattgaagttcttgtaaaaagagctgtatgtttgattcagtatcggaggaatgggaggtgatggattttatgtcataaaggtattcaggaaatagggtatttacgttgcgaggtgtgatgaaatgtgtgtacgtcgatgcaccacataataaagagaaaaatgtatctgcataggcagtatttgggatgctgcaaatcagcgagccagaaggctttagataaacggcaagagtctcaattgtatgtctgggattttttgagcagtttaaaaggtcaccgatcaaaattacatcgaaaaaggactcagggtaagggaggtcgcatgtttccacatctgccgaaatgacttgttcgtaataggggcttgcaatggtctgtaataactcatccttttcaatcccatacaataaacaggattgccggttcaaaagttctgtccccgcagctcccgtgccgcaaccgatatgtaagatagagtcggcttccgctggcacaagtgctgtcagctggggctgggagtcaaagaatgttgttacatccaccttccatttatcgatgaagcgttgccggttttcttcgtataattgattgatgcttaaatctggattgcctgtaaacgtggcatgaccgtgatggtggacaaacgaatcaagagcgataattagctgataccccgcttgcagtacgcggaggcttaaatcatcatcctcaaatgaaccgcctacaaaacgttcatcaaaaccgccgacttcatccaacaccttctttttgacaagcaggcaaaatccgaccagcctcaatacagcttttgatctgcctcgctgctgcaaacagtaaagacgagaaaaatcttcaatttcttcaacgtttgtatagttaacgggaacttgctgcggaccgctgacataattgcttacaggcccgaccatgccgattttatcatcctgataaagcagcttgatcattggctccagccattgatttgttacaacagtatcattgtttaaaaaaagaatattgtcccctgaggcaacttcaagaccctgattacaggcttttgcgaagccttcgttcgtcttattaaaaatcgccttaattgaagttatctgtttgaggtagtcacgtgtaccgtcatgagagccgttatctataacaattacttctatacagtcattattcgtatgcttccatatgctctccaagcattgttttgttaaagctaattgattataagtcagaacaataatactcgttttcactataacctccgcccttcgccatatcattcggatactatatgtatatcgtaatgttcagacggaatgattctttcctgtaaaaaggagaatgctgcttaaacgtaaaaatgtgaatggttttttaaagaaaaagtcgatgaatttgttttacatttagttttcccttaaggggatcaacaaggttggggaattcagggaaatagggatgataagttgccttaaccagtttgtatgaaagttatatttaattctttctgtactaaatggtgaattaggagttatatatttaaaggagaataccgatgagggcattattttatttaatacgtttatagcaggggagaaggacgaaatatcggtcagataaatttttatataggtttcgtgactttaaagggatcaattatgatttatagaatgttttttgtaactcaaactagttgagtactactttagaaagaatcatcgtgtacatataaacaatgataatttaatgaaatggacatcaatggtgtttccagaacatttaacgtagtttaaataagatttgattgacgtatcagaaattgaaaaaccgtccttagattagcaacatattgaagagatggatcttctagtctatgaggcacttgaatttaacaaagaattgctatcgagactatttgagatgtgtcgtaaatccactaataaaatctgtttttgaagaaatgtttaattcttaaaatggttaatcaatttaagtgcttcatttaagtctcttataagccgataaagtttactggaggacacaaatcataaaaatccccccaaaaaaatttttaagggggaataatacatatttaagaagtgtgacctctacttgcaacttcaaatgagtctttctcaataaaatatccaatatttttactccgactttagaagaagagatcatttgctccaacacaagccctcctatattaaatatgtaatattttatcatatttaaatgaataaggaagattaatgttatcttaaaaaacaaaaaagcctcctgcaaattatgagaagggtaagggaatatttttgagaatcatattccattgcttgttcacagtcagtaatccttgagttgttctagcaagaggcaatattgttgaataagaatagttttaaagaggttattgttgtcttcatattgaaataaagactaagtatattagaggggagttactttaatgcatatcacaacaaaaaggttattgatacgtgaatttgcattcacagattggcaggctgtatatgagtatacatctgatagtaatgtaatgaagtatatacctgaaggggtttttactgaagaagatgcaaaggcatttgtaaataaaaacaaaggtgataacgctgaaaaattccctgtcatactaagagatgaagactgtcttataggccatattgttttttataagtattttggtgaacatacatatgaaattgggtgggtgtttaatcccaattatcaaaataaagggtatgcttctgaggcagcccaagctatcttggaatatggatttaaagaaatgaacttacataggattatagctacgtgtcaacctgagaatattccctcataccgagttatggagaagattggaatgagaagagaaggcttttttaaaaaatgtattccaaaaggcaatgaatggtgggatgaatattattacgctattttagaggaagagtggaattgtaagagaggtaatgcaggaaattgaaaccataacagctatagaacgtatagtgatagtagggcttatagtgcttaatatgaatgatgtgagaggggtatccaaatgcaaattcatctcaccaaaagcggaaaacaagacaatcatcataaatggttaggaactgtcttgctcagttggggaacattcgtatttgctttgttttttgctactttagtcggttcaatggctagccaagcaggagcttccaagcttttgaagcaaggcatccaagcaggtttagtcacattaataactgtcccgttgctctacattcttcttaaacggatgtctagtagacccttttattctataggactgtctgggtggcggcaagccattccgaaagccataataggagcaatatatgtgattgtactatccgggtctggtttcgctatcgcccatttattaggctggatcaaagttacacaatttcacttctctgtccatttagtgacagcattgctcttaaatatgattatcgctttcttttatgaagcttttccagaggaattaacttttcgggggacggtgtactatgctctaaataagcgttggaactgttttatggccttactcctacagccgatcctgtttgtgcttgcaccaataactgtaagtggcttgcaatatatagttggaattgaatcatctgctatcacattagattacattgttttattgttgggttttggattcatccttcaactcctgcgtattgtaacaggaagcttatggacgtctatcgcttttcatctagcctttcttgaaaattctcggttcttcgtcctgcaggggaaggagcgctttattacctatgaagaaattgttccgggaacaggtgcgctgtttgtgatcttttttatgttgcttattgccggtactctactcttaatacctgttgcgataactcgccgaaatactattcaatggcggaagaatgagaaatgcgaccaagatgtttaatttctaagtagaacagtagttttaaagtgattttaaggaggatctagacaatgttgaagaagcattcatgatgaaagattagtagattttgattctcaaggtggaaaccatattagtgtttatttagttactcactttgagttatctgatcaatcgtattcttttgggtatgaagcataactgttcgtatgcaatggatattctaagcgttaaagaggaatttgatttcgatttcccatttaatatgcttgcaataaaaagctatgtacaagaattaataaaatgttagggattgatataactctgcctgaaatgaaagaaagagattttgacaaactttctcaagattaaataaaactacgattttaaagagaacggagacttgctttcaatatgaatgttaaaaaaactgcagctgttttttcaatcacgattccaattatctcagctatcctaattattaatttttttacgggagttatgtcaattccatggcaaggaatgccggtgttttttccattattgctttctcctataggaatcattttagcgttcgtttcaataaagacaaataaacggtgtgctttatatgggattgtcttaaatgcaattatgtttccatttccttttttctggtttatcggaggggctttgttttttggagtttaaaatccattaggcattacgcttatacattggtattttcgaacttgtcaaaagaaggaataaaaaaatttcagaattgcttggctttactttatgttgaaaggggtcgagtaaggtggataggaaaaaggatgaaatacaaagaaaatatagggaacaaatgagggagaagaaagaacgagaaaaagaagatggcagttcacatacttttgaaattgttgttgtgctagccattatcattttgatgtttttctttaattcagttttcaaggctttttagatattgtacagatgactttcaggatgtttgaaaaaataaccctttgatatatataccacatgaaagtattgaaggacttatgaaaattcaagagccagttgaatcttaataattaatcaccaaataatggggatgtaaaatgaaattgtataatgaatttatcaatatagctaaaatttttaataaagagctagacatcattccattattatatggatctttaggtcttgaaaaggtaactgggttagacttttctccagaagatattgatctccttattcctttaatttttttagaggaaaagtgggaaaaactaaaaaaagtgatggaactgcatggatacaaaatggttgatttacatgagcatgaatttaagaaaactaatacaaaaataggcattgcttacattgaggatttaaaagcatttgcagatgtagactataataatctagaggtttttgaagatggcggagcgaaatatcatttgctaacgattgatgattacctcaaggtttataaaaagtctttattagatggttatagaagaaggaagaagaatcataaagaccaaagtaaaattaacatattgaataaattaatacggaattaatttctgtattctcttttgtttccagtctcaattaaaatttttaagattaaaataagtttgaaaggataaatcatagtgtttaacacagccattaatcctcagacagtcaaaaagccatttctactccggttgaaagcttttcaatttttgcttcttatttatctttcctgtattgatatatgtatgtagggttggacttataacataaactattctggccattcctgttctttcaattcatgaccgggcttgccatcagcataaatctaggctaacagtctccatacatcctgtgatcacctttatcaaactcttaaatgcaacttaccactaaccaattctttatttcgcatagatcatctttgtcatgtgtttacacaagaatctgttttggactaatcgtcgttaactgatacatgacattcgcaaatatttgagacactgaatataacgaaacagtcaaaaatcaatatttaattcattctgtttaaactttctgaaaaagatgttgaaaaagttgaaaggattttataatattaaaacaagttagtttgttcgatcaacaaactaataagatgaactttcattgtccacaagataaggtcttactaaatatggatggaagggggataagagggtcgatttaatggagctaaacaatataagaaacgaaagaatgaggcttttatccttttccaggtatataaggtatgacgagaaaagatgaattttttgcttgctgatcaccatattttttcgcactgttttgaaagcgcttttataaaagtttactgaccgtaaattcgagaaattgttataccgtttcacactgttccatattaaaggatcgaaaaggggagaaatcatgctcagtgaaaatgtaaagaagattagcatggttgaaaaagttggatatgcgtctggagattttgcttgtaatttaatttatgcaacagtgtctacgtatcttttgttcttctatacagatgtttttggtttatcggcagcagcagccggtactatgtttttagtggttagaataatcgacgctctcgctgatccttttatcggaacaatagttgacagaacgaacagcagatttggacgctttagaccgtatcttttattcggagcttttccatttgtcatactggcaatactctgttttacaacaccagacttttcggatatggggaaattaatatatgcctatataacctatgttggcttgtcgcttacatacacaacgataaacgttccatatggcgcgttaacttctgcaatgactagaaataatcaagaagtggttagtataacttctgttcgcatgttatttgcgaatcttgggggacttgtcgttgcattttttgttcccttactggctgcttatttaagcgatacttccggcaacgagtctcttggctggcaactaaccatgggtattttgggaatgataggcgggtgccttttaatcttttgttttaaaagcacaaaagagcgggtcactcttcaaaaatccgaagagaaaattaaatttacggatatatttgagcagtttcgtgttaatcgtccacttgttgtattaagtattttctttattattatttttggagtgaattccatcagtaattcggttggcatttattacgtaacgtataacttagaaagagaggatttggtgaagtggtacggtttgataggaagtttgcccgctttggtcattttaccgtttattccaaggcttcatcaatttttggggaaaaagaaattactaaactatgcattattactgaatattatcggcctcttagctttactgtttgttccgccaagtaatgtttacctcatacttttctgtcgattaatcgctgctgctggaagtctcactgccgggggatatatgtgggcgcttattcctgaaacaatagaatatggagagtacaggactgggaaaagaatgggtgggctcatttacgctataatcggatttttctttaagtttggtatggccttaggaggagttgttccgggtctggttcttgataagtttggatatgtggcaaatcaggcacaaaccccaacggcattaatggggattctaattacaacaaccattattcccgtgttcttgctggttctagctttaattgatattaatttctataacttagatgagaaaaaatataaaaacatggttcgagaattagagaatagagacaaagtttatttggatcatattgatgatttcaaagcttaaaaaagaaaataaactgaggaggagtcccaaatgaagattaccaatccagtacttaaaggattcaatcccgatccaagtatttgtagggcaggaggggattattatatcgctgtatctacatttgagtggtttccgggagtccagatacaccactcaaaagatttagtaaattggcacttagttgcacatccattacagagagtttcacaattagacatgaaaggaaatccaaattcaggtggggtttgggcaccatgtttaagctatagtgatgggaagttttggctgatctatacggatgttaaggtagtagatggcgcatggaaagattgtcacaattatttagttacttgtgaaacgattaatggtgattggagtgagccgattacattaaatagctcgggatttgatgcttctttgttccatgataaggatggaacaaagtatttattaaatatgttatgggatcaccgtattgatcggcactcatttggaggaattgttatacaggaatattctgataaagagcaaaaattaatcggtaaaccaaaagttatatttgaaggaacggatagaaaactgacagaagctccgcacctttatcatatcgggaactattattatttattaactgcagaaggaggaacacggtacgaacatgctgctacaattgcccgttctgcaaatattgaggggccatatgaagttcatcccgataatccaatcttaacgtcatggcatgacccaggaaatccattgcaaaaatgtggtcatgcatccattgttcaaacacatacagatgagtggtatttagctcatttaacgggacgtcctattcatcctgacgatgattcaatttttcagcagagaggatactgtcctttgggcagagaaacagctattcaaaaactttactggaaagatgaatggccctatgtagtaggtggaaaagaaggaagcttggaggtagatgcaccttctatacccgaaacaatatttgaagcaacgtacccggaagttgatgaatttgaggattcaacattaaatataaattttcaaactttaaggattccattcacgaatgaattaggttcattgactcaagcgccaaatcatttacgattattcggtcatgaatcattgacctcgacatttactcaggcatttgtagccagacgctggcaaagtctccattttgaagccgaaactgctgttaagttttatccggaaaattttcaacaagccgctggattggtgaattactacaatacagagaactggacggctcttcaagtcacgcatgatgaagaacttggccgcattcttgaattaacaatatgtgacaacttttctttttcacagccattaaataataaaattgttattcctcgtgaagtaaagtatgtatatttaagagtaaatattgaaaaagacaaatattattatttctattcttttaacaaagaagattggcacaaaattgacatagcactggaatcgaaaaaattatcagatgattacatccgtgggggaggattcttcacaggggcctttgtagggatgcaatgccaagataccagtggtaatcatattccggccgactttagatattttcgttataaagaaaaataatttgcacatgaaaaaggagatttctattttagaactcctttttcatatgagaaggtgcctatgtcactattgcttcagaaatacccctagaataaaaaaactcatctttaaagatgagctgtacattccataaaaattacattgtaaccatgtccagaaaatgatcaatcacaatggaggacattcctaatgccggcgcattctgtcctaaggaagatggcaataattcatagctattgcctaattgggaataaacccttgacgatacttcacttctcattgaatttaaaaccataggatgtgattcaattatgctatttcttaaaattacggcctgtgggttgaaagtattcaaaatattggtaaggcctattcctaaatagaatccaaaattctgtaatgcgtttaaggttccgatatcattcagatgggcgaggtttatgatgtcttgataggacagttttttctctttggtctgaagagattttaataaagccttctctgaagcatacaattcccagcagcctcggtttccgcaactgcatttaggaccattaaagtctattgtcatatgtcccatttctccagaaaagccgcttactcctctatataaatgattgttgataataacaccgatccctatccctgtgctgatacttacgtaaataatgttatcgtgattttttgcagctccaaatactttctctccatatgcgccagcatttgcctcattttcaataaaaacaggcacattgtacttctcttgtatcgaagattttaagtcaatatctctccagttggagttcggagtgaaaacaattttttgatctttatcaatgagtccaggcacgcaaatacctataccaataagcccgtacggagattggggcatatgcgtcataaagtgatgaatcatatcaatcaaaatgtctttcgttatttctggagaattggattccaaatgacggtattgatcaagaacgatcgttccttcaaggtctgttaaaatgccattgatataatccacaccaacatctattcctacggagtatcctgcctttttattaaaaacaagcatgacaggtcttcttccgccacttgattgtccttgacctatttcaaataccagattttctttcattaacgtgtttacctgtgatgaaacagttgatttatttaatccagtcatttcagataattttgctcttgaaataggtgaatttttaaggatttcttttaataataacttttgatttacttttttgacaaaggtttgatcagcgatatccacttcatccactccatttgtttaatctttaaattaagtataaacatagtacatagcgaatcttccctttattatatctaatgtgttcataaaaaactaaaaaaaatattgaaaatactgatgaggttatataagatgaaagtaagttagtttgtttaaacaacaaactaataggtaacttacaatatgaaataaaatgcatttgtatttgaatgatcaggttttgaatttatttttaagggggaaatcacatggctcaatctcattccagttcaaccaactattttggaagcgcaaacaaagtggtttacgaagggaaagattcgactaatcctttagcatttaaatattataatcctcaagaagtaatcggcggaaaaacgatgaaagagcatttgcgattttctattgcctattggcatacatttactgctgatggtacagacgtttttggagcagctacgatgcaaagaccatgggatcactataaaggcatggatctagcgaagatgagagtagaagcagcatttgagatgtttgaaaaactagatgcaccattctttgcttttcatgaccgggatattgcaccagaaggcagtacgctaaaagagacaaaccaaaatttagatatgatcgtgggcatgattaaagattacatgagaaatagcggcgttaagctattatggaataccgcaaacatgtttacgaatccccgtttcgtccatggtgccgcgacttcttgcaatgcagatgtgtttgcgtatgctgcagcacaagtgaaaaaagggttagaaacagcaaaagagcttggcgctgagaactatgtattttggggcggccgtgaaggatatgaaacattgttaaataccgatttaaaatttgagcttgataatttggctagatttatgcatatggcagtggattatgcgaaggaaatcgggtacacagggcagtttttgattgagccaaaaccaaaagagccgaccacccatcaatacgatacagatgcagcaacaaccattgcctttttgaagcaatatggcttagacaatcattttaaattaaatcttgaagccaatcatgccacattagccgggcatacattcgaacatgaattgcgcatgacaagagtacatggtctgcttggctctgttgacgcaaaccagggtcatcctcttttaggctgggatacggatgaatttccgacggatttatattctacgacattagcaatgtacgaaatcctgcaaaatggcggcttaggaagcggcggattaaactttgacgcgaaggtcagaagatcttcttttgagcctgatgatctaatatatgcccatattgcagggatggatgcatttgcaagaggattgaaagttgcccacaaattaatcgaagatcgtgtgtttgaagatgtgattcaacatcgttaccgcagctttactgaagggattggtcttgaaattatagaaggaagagctaatttccacacacttgagcaatatgcgctaaatcataaatcaattaaaaacgaatctggaagacaggagaaattaaaagcgatattgaaccaatacattttagaagtataacaggataagctccagatcctgctatcaataccaagtcactgaattacccgtcatgattcctttcctattgcttgttgttatgacgggtaacttctataattaggatttatttagagtgaatggtttttaaaagggcaaggagtgaaaaaatgaagtatgtcattggaatagatcttggaacgagtgctgttaaaaccattttagttaatcaaaacggcaaggtttgtgcagaaacgtccaaaaggtacccgctcatccaagagagggcgggatatagtgagcaaaatcctgaagactgggtacagcaaacaattgaagcattggctgaattggtttctatatccaatgttcaagccaaggatattgacgggataagctattcgggacaaatgcatggattagtactgcttgaccaagatcttcaggtgttacgtaatgcaattctttggaatgataccagaacaacgcctcaatgtataaggatgaccgagaaatttggcgatcatcttcttgacatcacaaaaaaccgtgttttagaagggtttacattacctaaaatgttatgggtaaaggaacatgaacctgaactttttaaaaaaactgctgtgtttttgcttccgaaagactacgtgcgattccgtatgaccggtgccattcacaccgaatactccgatgcagcaggaactttacttttacatattactcgcaagaagtggagcaatgatatttgcaatcaaattggtatttctgcagatatttgtcctccgcttgttgaatctcatgattgtgtagggtcgctgcttccgcacgttgccgccaagaccgggctattagaaaaaacaaaagtgtacgctgggggagcagataatgcttgcggcgctattggagcaggtatcctttcttccggaaaaacattatgcagtattgggacgtcaggggtcatactttcctacgaagaagaaaaagaaagagactttaaagggaaagtccacttttttaatcatggaaaaaaggattctttttatacgatgggcgtcacgctcgctgcaggatacagcttggactggtttaaaagaacgtttgcaccaaacgaatcgtttgagcaattattgcagggggtggaagctattccgataggagccaatggactgctatacactccttatttggttggtgaaagaacgccgcatgctgattcttctattcggggaagcttgatcggaatggatggagcccataatagaaagcattttttgagggcaataatggaaggtatcacattctctttacatgaatcaattgagctattccgcaaagcgggaaaatcagttcatactgttgtttctattggtgggggagctaaaaatgatacgtggctgcaaatgcaagctgatattttcaatacgagggtaattaagttagaaaatgaacaagggccagctatgggggctgcaatgctggctgcctttggaagcggatggtttgaatcccttgaagaatgtgcagagcagttcattcgtgaggctgctgcattttatccaaaggcacaaaatgttcaaaaatataaaacactatttgatttgtataagaacatttatactcacacaaaggatctcaatcaagctttgaagagctttcgaaaaaactaatgatgttattgtctggagatcaacgaaagaacaattaacgattaatcatcaaaggcctttgatgacatggctgccttcttttgaaaagatggtgagaataaggtatcgcaacctttaaacagtattggagtgtccagcagacaaaacgaacgagcggaaccgtattctgtcagcgaacacttcaagaagtgagaaagcttaggaatgccaatgggtaagatgtatgaaaccgcgctaacgacggtagagggatctcttgatttatgatgaaataggaaggatgtttacacacaaataaccccctcacattgacgtgaaggggtgttttttattgttactatacagcggaaattttacaggctagttgcatgattttagcttgataagcagaatggaactagactctccatcatctctttctaattctttggaaactgcattctgctaggtttgctgctttttttaacaaacagtgtttttctatttcacacagccattaaatcctctgttcgtcacataaccgctcttactccaaattgacagtttatctgattttgcttcttgctcatctagtctgaattggtctatgtattttgtgttaggctcatatacatatgctactctggccaatccctctttcaataatgtctcttgaacagatttgccgtcaacataaacgtatgctaacagtcttccatacttatctctgcgatcgcctttatcaaattccagctgtagcttaccgctgttgaccaattctttatttcgtttcgacgcatcctcaccgtatggttgaacacaagaatttggtttcttcgtctcaggtgtatcaacgagcaagtagcgcactgtgtcttcctttccgttgtaaataaccttaatcgtatctccatctattgctctatctaatgtaacatcgaccaatttcttctgattttttgaatgaggcgtgccggccttttgttctgtctgattatatttattagattgagtatcttgagagacttgctccgtcccattagaatctgaatggtttttggctgcgtgatttgatccgcaagctgccaaagtaatacttaaaacgattgcgatcatactgatcaaaatcttcttcatattgattccctctttatcattttctctttttgcgtttaaacatcatcattataacgatatggacattttttgtgaatggaaaacttcaagggaacttataacactccaaattgccaatagttaactttacaacgagatgatcaaaacatcaccatcacatagcggaaataaataatcctgaaaataatattgactgaaaatgcttttggaattatgataatatgagaaatgacaataatgtaacaaaaacattactacaacataacaactgatagcttaggtttattctattggctaaaaatgtaaacggttacaaatccagaggcgaaaatctaagatagagatgactttagttttgactcaatatccacactgaaagagcttattaagtattcttaataaaggcaggggaaatggatatgaatgaacatcgaaatcgaaggttgaaattaataatgatttcagcaacttttggagggcttctctttggatatgacaccggagttataaatggagctttaccttttatggcaaggccagatcagcttgatttaacaccggttacagaagggcttgttacgagtattcttttattaggtgccgcatttggagcgttgttatgcggaagattggctgatcgatatggccgacgtaaaatgatccttaatctttcctttttatttttcctggcatcactgggaacagcgttagcacctaatgttttcatcatggcggcctttcgttttttactggggctggctgttggaggagcctcggcgatggtgccggcctttttagcagaaatggcaccgcatgaaaagagagggcgtatggtaacccaaaatgaactaatgattgttggcgggcaatttttagcatatgtttttaatgcgatcctcggtgtaacaatggcaaatacgggacatgtttggagatacatgctagtcatttgtgctgttccggctatcatgttatttgccagtatgcttaaggtcccagaaagcccccgatggctaatcaccaaaggcaaaaacagtgaggcgctgcgagttcttaaacaaattcgagaagataaacgtgcagaagctgaatgtagaaaaattcaagaagcggtagaaaaagatacagcactagaaaaggcatcactcaaggacttttctacaccatggctgcgccgtcttttatggattggaattggtgttgccatcgtgaatcaaattacaggtgtgaactcgattatgtattatggcacacaaatccttaaagaatctggttttggtacaaaagcggctttaatcgctaatattggaaatgggctgatatcagttattgcagttatatttgggatttggctggtcggaaaagtgagacggcgtccaatattattgattggtttggcggggacgactacagctctcctattgattgcgattttctcaattgtgcttgatggatctatggcacttccttatgtagtgctttctttgaccgttttatttcttgcctttatgcaagggtgtgtaggacctgtgacttggcttgtcatagcggaaatattccctcaaaggttaagaggacttggttctgggataagtgtttttttcctttggatattaaactttgtgatcggttttgctttcccgatcttgcttagctctgtaggtttgtcttttacattctttatatttgtggctttaggtgtattggcaatcggttttgtgtacaaattcatgccggaaacaaaagggcgtacacttgaagaattagaagagcattttcgttctcgacacgatcataatactcctgaacaatcagttattgagttataaatatgttgaaaatctctcttcttataggagggatttttttagtttcagaaaaaacaaaatccctctggtagagggattttgattcagcattttaagatgttctacacgtataatactggagttgatactttaaaaatctcgccatctcttatataaaaacgagggatgcggcggcttaatgtagacacgacttcatagttaatcgtattgagcatttcagccacttcatcaacggaaatctcggctcctttttgcttaccgtaaatcacgacttcttctccttgtttaccttcaccgttttctcctaaactgaccatgatcatatccattgttactcttcccgccactggcactcgttttccgcgatgaagaacaaatccgcgattggaaagggcacgagaatagccgtcagcatagccaatcgggagtgtagcaattacttcattaggttctgcgatgtatgtagcaccatagctaacggttcggggttctgtccgcatggttttcacataagcgatgcgtgcctttaaacttaacgcaggttcaagcttaacgagatttagttgtttaatataggctgaaggatataaaccatataagccgatacctaaacggatcatatcagcgctaaattccggaaatgcgatagctgcagccgtgttgcacatatgcacggtgggcagctcaatcccctgtttttttaaaaagctgagaaaactgatgaatttttcatgctgcagctttgtgagtgtggtgtccggttcatcagctgtcgaaaaatgtgtgaaaatccctgtccatctgaggaatttacttgcctttaaggctttcactacttctaaaagttcttcctttgtgcgtacacctaatcgtcccatgccggtatccacgttaatatgaatggccagccggttagcactcgcttctttttccaatatctcgtttgcttctttcatccaatcaacctgaaatgctgataatgttatattccaagctgctgacttctttacacaactaagggatgtaaaaccaagcacaaggataggtgctgtaatcccagctttacgtaaaacgattccttcctccacactggcaacagcgagctcactcgccccgtgttccagtgcatggcgtgccacttctatagacccgtggccataaccgttcgcttttacaacagccataattttgctcttatgtggaatatgacggcggatcgctcgcaaattctttttaacggcatcaagattgacttcgatccaaacttctcggcaaagctttatcatcaacgcttccttccttcttatggattgtaaataccacctattgccgcaagaataaatgttaattgttggatgattcgatcttattttattcaactttatttgaaatcattcaacagcaaatccatgtgatacgagaaggtgcctatcaatgttcgaataatagcaagtacgggatacatgaggcttgtaagtggggtgttaatggatgcggcgaccgaggattacaaaaatgattatttgttttgggacatttttttctaagggtagatgataacgagaaatctaatcaggaaatacttaccgttgttatgaacattgaagaaccttttaaatgagaagggctgaggaaattctgtaaaagataatcggttgaaaaggcagtcgattccttgttccataaacctaacatcagagtatataattatactcgtattcacaaaaatcgtttaagtaaggggtatacatgaataggggagttagttttcaaataccgaatgaatatggaaattttctatggagaatactgcagccggtagaaatagctaattataggtggcaaacgagtggggaatcttattttgttgtagaaggagagctcgatgatgaggagctttttcatgactacgcaattgttgagggggcagtttttgagcaacaattaaaaacgaatcagtactataccattttcgttgaactgaaagcatttccatatggaaaaatggttaatcaagtcaatacatatgaagagtttgctgacagtgattgcgaacttgtccttttgatagcagataatagctacgtttcgatttactgtaaaaacaaaaatatcattgaaaaactttacttcaatgctttacagaatgattttgaagacgttcaatttataactgatgaaaatgacacaagaacaagccttactgtatgatactcaataaaaattaaaggagctagtacatgacaatgcaaattaaaatcaagtatctagatgaaacacaaacaagaatcagcaaaattgagcagggagactggattgatcttcgggcagctgaagatgtaacaatcaaaaaagatgaatttaagcttgtcccattaggtgttgcaatggagctgcctgaaggttacgaagcacatgtcgtccctcgttcaagtacatataagaactttggcgttattcaaacaaattcaatgggtgttatcgatgagtcatataagggagacaacgatttctggttctttcctgcttatgcattgcgtgatactgaaattaagaagggtgatcgtatctgccagtttagaatcatgaagaaaatgccggcggttgaattggttgaagtcgagcatttgggaaacgaggatagaggaggactcggttcaacaggtacgaagtaaacaaaataaatccttggctgtcttcatgctgtgtgattgatcaatggaggtttcagccaaggtacaaagaaatacttttatctaaatttttataagtaggggaaggcaactacaaactagtaatgccactaataataagccaagttaaatgacatgtgttcattaataattgaatttacagcagccatgagcacaaaaaaatctgagtatcgtcgataaatatcataaaaaaccccccggtatgtcgccggggaataaatagacgtttaagagatttagtgatgttttttatatgattcgacaaaatcataataatgatcatcgtcatcataatactttttttcgtaatgataatcgtgatcatcgtaatactttttatcatggtcatcatactttttgtcgtaatcataatgttttttatcatgatcataatacttgtcgcaatcataatgcttcttatcattgtcgtaatactttttgtaatatgtttttttccaagtgtaatactcttctttatattttttataataacccaattaaattcctcctttatgttattcgaatttaatttatgaagtttaaatgatatggtatggtcaaatgaaataagaatagtaaaaagaggctgtttaaaacactttctgaaaaacaaaacggatagctgtttattaaaacaagagcgagagaaagcactcaatcactgtaaaataatagtaaagtgtatagagaggattaatatacgtaaaaagggactttctcattgaagaatatttgaacgttatggttaagattcagagctctatgatgtgatttttaacactgcttttgaaggatttaaagttagacatcaaaaacaaacagcaaaaccggttagaaacagatcatataaggaatgaaccgctgccaaatatcataaaaaagttgttaatgatcaaatgaatgaaattagagagaatttattttaaagaaagcccaattgcacatggacaaatgacaattgatattgaggtaaaatacaatgcattaaatcagaaaaagctattggaggatttaatgtgtttagacaatttccaatttggtatacacaaacacctgactatttgaatttttatgtaccgcaatatcaaaccatttcgtataatcctcaacaatgttatcaacggtgtatgtaccaaactggcggtaactatgagctatgtgacagactatgttatggagaaatacaggtgtaaaagaggggggattaactcctctttaaacacacagtgagtggaataagatcctcactttatctgcaagtgcttagtatttgcgataatattgcattcgtaataaattatgcttagcaactgaaaatgaaagaaggatatgaatagtcatgacgcaattcgataaacaatacaattcaattataaaggatattatcaataatggaatctcagacgaagagtttgatgtaagaaccaagtgggactcagatggaacaccggcacatactctaagtgtaatcagtaagcaaatgagattcgacaactcagaggttccgattttaacgacaaaaaagcttgcctggaaaacagccattaaagagttgctctggatttggcagctgaaatctaatgatattaatgatttaaacaagatgagcgtacatatttgggatcaatggaaacaagaagacggcaccatcggacatgcatatggatttcagttggggaagaaaaacagaagtctaaatggagaaaaagtggatcaggtagactatcttcttcatcaattgaagaacaatccatcttcacgcagacacattacaatgctgtggaatcctgatgaattagacgcaatggccttaacgccatgtgtatacgagacacaatggtacgttaaacatgggaaactccaccttgaggtaagagcacggagcaatgatatggcattgggaaatccattcaatgtattccagtataatgtgttgcagcgcatgattgctcaagtgactggttatgagcttggtgaatatatctttaacattggggattgccatgtgtacacacgtcatatagacaatttgaaaatccaaatggaaagagaacagtttgaagcacctgaactatggatcaatcctgaagtgaaagatttttatgactttaccatcgatgatttcaagttaatcaactataaacatggggacaagcttttatttgaggtagcggtttaatgctgcctttttattgttatttttcagaatataagctggcattaggctaaaaatgaagaaatttcttcttcatatttctataaacaaatagtaaacaaaattggagcccaacgcgaaacaaaaggattgttagaagcgttgggttctcttagtacaagtgaacaacgattgcgtggtctgaaaaattaaacgaacgatatgaaaaggccattggttttataaggtgttaattcctcctattaatatcataaggctcaagaaaattgtaatgaaaagaaaagcccatactatagctgtaaaaggattgttgagtcccatcctttctttccaatttatattagtggatcgattggttttgtattttattaactggatacataagatcacattaaaaaaaactgaaataacaagagctataactaaataaaggttcattttcatcaacctttctaggttttttaaacacttgaatagcttaattgtaaacctaatattaacatatacatatttcaccttaaaagaccagcatcgtgcaatgaatacaattactttgtgcagttctaggttatttgtttttattatgaaactttttggtccctggctaaaattcaacttaaaaatgaaaagattgaaattatccatgattgtgtttctgcgatggattgccttaaaatttggtagggatgaacaagcactatattaaataatactataccaatgaatttctattagaaaaattcataatattttaaaataaccatttaaatatatttctagaaattgtatacttatatggtactaaatgaatacatagaaaggactgttgtcgatgaaaaaagttttttgtaagttagccattagttctatagctctatttaccctatctcttcctaatggcaatgtattagctgctgaaaaaggggaagaaaaacctgtctcaattaaaggcgttgagtcacaagtgcatactgtatttgcaaacgagacaactggggtaaaaagcaacttaggaggaggagagtttactgcgcaatttgtgaatgattttcgtaatgttaagatgaatgtaaaaacatataaaagctggtctagctttaaaagagtttctgataatatagcaacggggagtaaaggaggatctattactgcaaacaaaacagttacttttacaacaactgtcagcggatctataagtggtttaggaatatccactgcaggctctgtagctagctctaaaggatacactctaaatgttggagcgaataaaagagtctatatggcatatagagttaggtataatgtagaagaagggtacaattgtcgtaaggatatagttactggtaaatgtgtatcaaagaaaaaatacgtagttaaaaaacctatgtatggagaatatgcactgaaaaactattaattttatataaaaaagattagctataaaagctaatcttttttattaagaagaaaatatcctaattttgaaacgagatacaaagtgaaagcaatcattaatgttctcgatataacaattccatgaatagccaaatcatatccagcaggtatcaaagcttttgtattaaacataaaatacattgataccagaagagcaataataactaaaataattccaaaaagacctatttttccgtatttcatacaaattccaccctatattaaaatatgataaataaccaaaggagctgaagatttcgataattcactttacaatcatcaagcaatgaccaacatcgaacctttgttggtgtaattgtcaacttaagcttcaagttagttatttttgtaattaaaaaataattgaaagccccataaataaggggcttttaatttatgtagttctatagtaattgaattaatcataccaaagttatttcaaaatttcaacttttgcttatgatgtttttatcatcgaaacaaaaatgtcttaattctaacgctgttcaaataaagtttcatataaaaaggaagtactactgttcgtaaatctatatagggagtggattccgacacggttttttatggagatggaaaattaattataaaaccgccagacaatgctggcggctttttgctgcttcgtttatttattaacagagatcgtaacgttatttcctgcaactgaaacctttgcgaaatcctgtgtatctaccacaggagtgacggctttattgtcgattgtgatgttgttaaaagatgtcgaaaaggttgctttgatcgcatcacgctggctttcatacgaaacagccgcggtagcaagggttttccattttgaaatcgtgccgatgttggttccttgaatttctgtgataatccgtccggtgtagccgtcattgttcgttccccaaagggtcatgcgcgtattgccgcttaaatttttatagattgtcatttggactgtgcttccagggcggaagcctttattgtatgtgaatttgtcttttccttcgatgtacgtttcttcatttttggacccaaccttcatgaggggcttccagacgttgtattgtttgctgtactgaagcccgatatcggcttcagttccgcttgttgccctaaagccagaataaatatagggagtagagaccgagtcgttgtttttgacagtttcaggaagcgtgattttagctgtaaaaatggcgcccgtactgttcaggtagacacggccgccgattccgttaggcagctgggatgctgcttttgcgacttgagcgtctgccgcgggtaaacctggtatacctgatgaaagggttccgaaaagaactgcagttcctactgcacctgcaatcaatacttttttcatcaaaattccccctttagatagtggtttcgccatttattatacctaattttggaactggattgatgtatataaatcgacaaaatatttcattttgagtgaagtaagggacgaaacgcttcgccaatctgaaagctatatacctttatcagaggaaagaatgagatcacaatcgttttaaccgatttgaaattttcctcaaaataaaagtacaaatgcttaaagaaacgattattaaaagaatgcccgctatcgtttcccagcctgtaaaaaagaggtgacgtttcatcaatgtctgtccttgtaaaatgataaaagcacagataccgactaagaaaagaaaacaaatacttaggattgctaacgctttacgtgagtatgttttcatttcatctttaaaatacagcaatacgaaaacaaagcagataacattggctattgtgcttatcacctcaaagcttttcatgacaactgatataaatagacaaagtaaaatgagataaaatacgatgtttctatacaaaaaacctctccttttatgtatgatcctcaaagagtttataaaagtttctttgtaactgcaataaactgaatgcgctcaattatgaactaactaaactatgtactaaatattcactattcattttcagattcagtcaccaaggttttcatagaaagggaagcttcagaaatatacatatagtgcacaaacaaaaaagacccggcaatagccgggggaaagtaaaaacgaggagatgttaatggcgtttagtagtgttttttatgctttttatactctacaacataatcatagtcttttttatcgtgatcataatattttttatcatagtcatcatattttttgtcgtaatcacagtcataatcttttttatcatgatggtcataatcttttttatcatattcgtaatacttcttataatacgtttttttgaccgtataatactcttctttgtattttttgtaataacccatatatactcctcctttatttttactacgctttattatacggcgagtagattttgcggcttggacagttaaaatcatagaaggaaaaaagggctgtccaaatgatagaaaaagacagatgacacaaaaacaaatcaaaataaagagccgatttttcatcggcccaaacgatttatcctacatttgtttgtcttcttttttttctgagtcattttttctgatatcctgagtcagtccgcttgttgcttgtttaaattctgataaggcttttcctgctgcacggccaagcgccggcagtttatcaggcccaaatactaaaaaacccacaaacaaaataacgagtatttttgtgaagcttaattccatatccttttccccctgattgaagtacaaccttttaaacaaattataagagatagcagtacaaatgggaatgcatttattttgaacattttaaaaccagacaaagacggattcataaaacggctgctgctgaatataatgtccaatgccacctgcctaagaagcagggaggaaggctggatcaattatgtagctctgccggaaatgatacaaacgtatctgcggctatcattgaaatagaggagtggtgtagctgatgagattcactaaggtagttggatttttgtctgttttagggttggctgcggtttttccattaacggcacaagcagaaaaagccggaactgcgggggctggagaatgggataagttggggacttacacatatacttactcaagtccgacggtatactcgaccggaggagattttagagtgtgcctttcaggaagcactcctttttctgtttcactgcacttatatgaggatgatcccggtgacaatcctgatgattatgtaggggcaaactatttttcacccggagaatgccacacctttggcagtattggaaaatttgtagatgggagcaataacaaggccgagttctttgttaccgattactctggtaaatctaaaactgttacgttttatgattgatggactcaaattgtgaagtataactcttgggaaaaataaaaaagagagagatacctctctcttttttattcttcgacagctttacgaagccgttcatttacaatgccagtccagccgccatccatcttaccgcgaacgacggagcttttctcgtttgctttgccgatcacttcattcggctctttccagccgctgtgaataagggtaaaccctgtcttttcccccaagtcttctaattgaaaggtaacgacccatccttctgtatcccattcaaaagaaagttcagttggagcttgaacagccaaaactttacaaggggacggcccaaacggcgattgtaagtgaaattcttgtccttctttgagctgaaagtcattgggcataaaccacttggcaatgccttctgaagtagagactgtctcccagactttctgaatgggagcctccagggtaatgctttttgtaatatccggtaatgcattttcgttgttttgagccatttcgtttacctcttgacatatgatgtttttttcaattcaatcatataataactaatatgatcatgtccatagcgtgcattatttatgctagagctgctgttcaacagcgtgtcagttgccagtctgatctgtgaatgggagaattctgcatgttcgagaaagagagagatgtgtatgttgtcatttcgttcatgcttgtttgctcagccgcaacagttatgtttgaactggaattcctgttcagccaatttattttgcgatttttgttttaatagtaaatgagccattttctaaaacaggaggttttttatgcttggaaaaatcaaagcagccattgataacagtccagggaagccggccagaattatagttagtgaaaaagcgtttcagcaattagaggaagaaatgcgctttgtttacgtttccaaaccgaaaacgataatggggattcctgtggaagtttcagaacaggcagaaagcttcaagctggaattttagtttatcccagactgctaaaaggctcattttatgataattatgcaaaatggtcaggttggtttctttaaaagcatgatgaaatgttcatcatgctttttttatcgagaaaaaagacgaacataaaaaataggtatacgggaaaaataatcctattagagagaggggaactgacagatggataacatgatatcaacacttactgactggaatgtgtggtttcaagtgttaattgtatttctcgttccatatgtaatctataaagtgtttacttggattcatgtataagaaggtgcaatgatgaggtggcggagcaatcagtacaaaacacagaagcagcatatatcaggtcattcaacagctgaaaaggatcaggatgtgttaaccggtaacatcggatacgatttagaacatgtaaaaagaaaaataggacataacggggacgttcacttccgtgagcttgaaatcactcatttacatgtaaaagcggtattgatctttgttgaaggaatgtctgatcaggaattgattaataaaggtctatcagtgttagttatgaatcaacctaatcaggtaagcgatgaaattcaatccggcaaaggtactttaacttcgaaacagataaaaaatcaaatcatatcaatcggtgatgtcatagaatcagagaaaatcagtgatatcgtgttgaatgtgttcatgggttcgacagcgcttctcatcgatggaataccgcaggcctttcttctgggaactgtaaaaaaacaaaatcgaagtatcgaggagccgctttcagaagcgcttgtcagaggaccgcgcacaggctttacagaagagttgagtacgaatacagctcttttgagacagcaaggaaaaaatgatcaattaacattgcagagatttgaagtaggaacacgattaaaaaaggatttaatcatcgcttatatgaatgacattgcagatccaaaagtagtcgaggaagtaagaaaaagagtgagagggattgagatcgatcatttgccggagtcaggttacgttgaacagttaattgaggataattatttgagcccgttcccgcaagtacagagtacagaacgtcctgatcgcgtcataagcggattaatggaaggaagagtagccattctgcttgacggcactccgtttgctttgattgttccagtcactttcagcatgatgcttcaatcgcctgaagattattatgaacggtggttcccgagctcgctcatcagattgctgaggttcatcgcagcaatgataacgttattcgcacccgctttatatatatcatttatttcttttcatcctgggttaattccgaccaagctggcgatttcaatttccgggacgcgccaaggtgttccgttcccatctctgattgaagccttatttatggaagtcgcgattgaaattttaagagaggcggggcttcgtttgccaaaaccgattggacccgcaataggcatagtgggcggattaatcatcggggaagcagctgtgcaggcggggattgtcagtccaatcatggtcattgttgttgcgctcacagcaatttcttcatttgccatcccgcattatagcacaggtatagcacttcggatgcttcggtttggcgcgatgttttgtgcggcggtgtttggattgtttggagtcattatgtattatctgctgctaagcagccatgtcgtaaagctaaagagctttggtgtgccatacgcaagtccggcagtgccctatcacttaaaagattggaaagactttgttatcagaatgcctcttttagtcatgaagcgccggcctaaaatgatgaatacagataatacaaaacgggtgaagtgatgaactcgacaggatggtgataaagtctcatgttcagcccaaccagtaaaatcacaaccgctcaggcaacgattatcatcattaattatatgcttgctgccggagttcttacgctccctcggacagtaacagaacaaacacaatctcctgatggatggatttcagttttattaggcggggtcctagcggtaatagccgggatgatgatagttaaattaagccagcagtatcctaaggagaccttttatgaatactcccgacatattgtaggaaaatggctcgggcatctgatcagtattgtttttattacttattttctggcactcggtgcatctgaagtcagagtcatgtccgaaatcgtggatttttttctcctcgaagggacaccgtcttgggccatcattatgacagttctttggattgggctttattcaattacacaaggcctagatccgattgcacggctttttgaaatgatttttccgattacggtcatcatctttttaacgatagccctcatgagtttaggcatatttgagatcaacaatttgcgccctgtattaggtgatggaatcatgccggttcttagaggtgtaaagacaacgaacctttcatttacatgttcagaaattatgttcattttagtagcatttatgaaaaagccgaaaaatgcggtgaaagcagttgtgatcgggacaagcgttgtgaccagtttttatatgattacgatgattatggtcatcggtgcactatcagttgagggagttgtgacgagaacatggccggggcttgacctgatgagaagttttgaaatacctggtttaatatttgaacggtttgaatcatttctgcttgtgatttggattatgcagctttttgccacgtttattatcactttttatgcagcttccctgggagtctcacaagtttttaaaaagaaacccctttcatgtatgtttgggctgcttcctgttatatatatcctctcttgcatgccgaaaaatgaaaatgacgtctttatattgggcgatacggtcagtcatatcgctttgtatatatttggcgctttgccgattttgctgttagtcatttcgaaatggaggaaaagaggtgaaaagtaaactaaaacgtcaattgcctgctatggtcatagtatgtctgctgatgatttgcgtaacaggatgctggagcagtcgggaaatagaagatctcggtctcacattcgctatcgcaattgataaaggaaaagaaacgaacactgaaaaagagttaaaagaagagggcgggagctatccgaaaaaagacaacattacgctgacctatcaatttgttaatgaaaaagcggcaggcgcgggcacaagcgggggaggcggtagcggacaaggagcgcaaaaagcgtacattaatataagtgaaacaggggattcattacagcagatcggaagtgaggttgcattaagacgggaccgagaagtgtttagcccgcatttaaaagttgttgtcatgagtgaagatgtgctgcacacatttcctatcgacgaaatgctggatcaattttttcgtgataatgaaatcaggctgagttgtcttgttttatctgctaaaggggaagcaagagacgctctccagctgaaagagaacggagaaatcccggcttttcggctgattggattaggtgaaaatgaacataaagtttccagaatacttccccctataacactcgcgaaactaattggaaaactgcattctggcagcagttttttactgcaaaatgtggttgcggcaaatggagcggtcaagtattccggagcagctgtaatcaacggaaaatcgaaaaaaatgatcggcactttaaatgaatatgaaactgaggggattacatggattagaggagaagggaaaggcggagttgtcaaaagtcatgataaaaagagccaacagacattagcgtacgatatcaataaaatcaaaagcaaaattcagccaatcgtaaaagggaaagatatttcattccatgtcgatattgaatcagaaggcgatttggttgaaaactggaacacaaaagaggcgttggacacccagtttatagatcgtctcgaaacgactattgaaaacgaggtaaagaaaatagttggtcaggtattaaaaaaaattcagcatgattataaagcagatgttgcgggttttgatgaatcttttagacttacatatcctcacttatggaaaagggtgaaaaataactgggatgacaccttcagtaaagccgacatcacatacagtgtgaacgtcacaattactcatttcggcacggttaaaactcagtaatgaatcccaaggaagagaaggaaacctctcttctcttttttatgcattttttaggatgaagatactttttttggagagatatacacttttcaaatcgaccaatatgctaatataggaattgcttgaaatagaagggacaaggggctgtgaggcagaaaccgatttatgtagaaatcgaaatgaaatctgatctggatacactctgggaatatacacaaaacccatcactgcataaggaatgggatctccggttttcaaatattacgtatttgaatagtcagccatgcgaaaaacagaagtttctttacgaaacaagggtaggctttggattaaaggtgtcaggtacaggagaaaccgtcggtgttttcaacaaatgttcatctgaaaggtcttcttcactggcttttggctctgatcatccattatctctgattcggcatggaagcggctactggaagtatatacagagagaaaatgggaaaatgacgtttttaacacagtatcaatacaaaacagcctacggactgccgggaagatggattgatcgtttattatttcggccgctgcttggctgggcgactgcctggagctttgatgcattaaggctttgggtagagcaaaataaacatccgaagcgcttcattcgatctgctatcatctatgtgttcatgtgtctgtttttcagcctgttttggttctatcaaggctttgcaggtgttaagacaagcatattggcaggaacagcggagataggcttagctattttgtggctgcttcctttaaaaagaaaatggatcattcatggtgtccaggcttgtatttttgctgggtttgcttgtctaggttccgaaatattcatgtgggttctgttgagtgtgttttccgctgcaagcggcgctcttagcctgcagctccccagtgccaggcgcacaaaacgaaagagaaagaagtgacattgtgagttcgatttatgaaaaatcaattattaactatcatttgctgcatcccaagctgcagaaacggtaccaattagacgggtctcatacattcagcgggacgggaacgatgtcagaaataagcggaggctcttttctggttagaatgctgttaaagctgggtgtttttttcagatgcttcttttcagaaagaggcaaagacattccatttacaatacaaaatagaacttgtcttttgaaatcgcaacatacaggaatagaatggaatcgtacatttttctttaaaggcaaaaaacgtttctttgatgcgttaatgatatatgacgagaaagaaaatagaatacttgatttcttcggcaaacctcatctgctgctgtctgttttgacgttcgaggcatctcatgacggctctcttacgatcacatcgggaaagcaatggctattaatatgcggaaaaagaatcccgctgccgaaatggctgaccggtacatccgtagtttgcgaaacgtttgatgaaaaaaagaattgtttcaccattgaagtgcatgtgcaaaatacaattcttggcactcttttcttttataaaggaacgtttcaggaggaagagagagaatcatgaaacgaaatggcatagtcagtgcgctttgttttattggatttcttgcagcagaagcaccggatatttcagtggcagaggcactcgttttgttatccattctatttttcgtgccgggaatttttccttttgtttttcgtcaatctccggttcgtgctgctcagtttatggaatatgggctaatccagtggtatccggcagccgcattctttgcggtgctggctctagtgacggaggttgggggtttcgcacttatctggtggatgtacacagtttttattgcattgtatgcgatcctccgcctttgggaaacaaagatacatagaatcgaagagacatcagttttgttcggccttatttatttggcgggaggaggattttggttttttgcttatgctgcccatttgcagatcatgcaatttggccctctcatcattttgctgactgctgtccactttcactattctgcttttctgatcccgatcttcaacggtttactcggcagaaccattagaaaacatcggatgttgtacagttggataacatgggtgatttttctttcgccccttcttatcgcactgggcatcacatattcaaaaacacttgatgtcattgcggttagcatttatatggcggcgatttatcttcatgcatttttggtgttcacggcagcttttcgcaccaagacggggacatttcttattcggctttcttccgctgttttaatgataacgattgctttctcgatgatttattcatttggtgtatttcggcaagaagttacattgaccatcaatcagatgatttggattcacggttttgtcaatgcgtttggtgttatcttgcccgctctcatagggtggagaatagaggatgcgaaaccttttgatgcagacagtgtaaagacattcagccgtatctacggaaaaagaaagattggagaagaatttttagctaacattcaagctgaaaataacgctcggtacagcggacttgtggatgatatgggcagcctgcgttcaaaagatttttcaccagaaaaactggagccgctcattctttcgttttatgaacaaaccatcgaatacaatattaaagcaaaagtaacatggagcacgtggtttcggccgcttgcaattatttacgaatggttcagcagaagaatcggccaaatacatctttcgacgaaccctgactggtataggatgtacagcaagataagaggtgttcattctaaaaaagacggaagggaaagagtacgtgcctggattagaacaaatgaaaaaaacgaaaccatttttaccgctctttattcagtgtatcgttcaaatggagaggggtatatgaatatttctttaccgcttccattcagcagcatgacaggtattttaaaaccatatcatcaccaggagaagctggttttaacaagcaggcggagaaaaagcagagcgggggatgagggaatttatctgcaaacaagagcgggaacttgtccgcttcctttatctgaaacctttctgatagaagctgcacatgacaacaaattaaccgctgttcatcatatgtggctgtttgaaataaaatttctaactgttcattacagcattacacatattaaccagcctattgaaagaacctaacacaaagaagaagcttcgtctgccagttgctgcatttcaaaattctgcaccgcatcaagacaggaaaggaagggtttatggtgttttatatcagtttatttctgattctttggctggctgcggggtttgcagtgggaatgaaacaagtgtatgtcgatcagctgtttgataaaactgtgatcgaaaggctggaaaaagaagcgaatgatcatggacaagctgaccggatgatcaaacagcgcgccctttatattgcagcagtgacattaagcgggtttatttctgtttattatgaaatgaaaacaatcccgcaaaggcgaaacataagaaaaattgaaaaaaacatcatgaaattaaatcaagtaaaaaaacgaagaatgaagagaaaataaaaatgcacaggccaaagggcaggtgcatttttgttttgtatggaaatgggggaggtggtgccagcttacttttcataaattcaaaaatgagaagaacagcgcccgggctaatggtatataatattgtgaatttaacaaaaatttaacaaggaggacgagagaattcgtgcttaagcctcaaagagacctacatcctgttgatttggacttagaggcggagtagatgaaaccggccaaagtatccctgctccgccgtttgctccattccttgaagcatgttgattgtaacatagccaaacgttttccatcaactattaaaattgtaaaattattgtttatttttatggtatttactccgatttcttcaatttctgctgaagatgtataccagaattttgaggaattaaaaaacaatgaagatccttctgattacgacgttgttacgaaagaaaacggaagccctgttcttgttttagccattcacggaggaggtattgaaggagggacaagtgaagtagcgagagagctcagcaaagagtactcgatgtatttatttgaaggcttaaaatcggcaggaaactcagtcctgcacattacgagcacgcactttgatgaacctcgggcccttaaaatgacgggaaatcatgaatatgtcatttcattacacgggtacgcagaagaagatcagcagatcgaagtcggcggtacagatcgcgtaagagcggcagatttagttgagaaattgcagcatgccggttttcctgctgtattgctcaatacggaccatccacatgcgggcgttagtccgaataacattgcaaataaatcaaaaacaggtttaagtatccagatagaaatgagcacaggctttcgaaagtctttgttcggcatcttttctttaaaaagcagagctgttactcaaaatgagaggttttataagtttacagaagtgatgttccgttttctcaaatatagctactgaaaaataggaggcgataagacagcctcctattctttatgcttctcattcgtttcgggaaacagctcgtccgcggcttccgtttgatactgcaacgtgttatctctcgctgacagttcatttcggaaattttcatcaagtacatttttcaataaataccgatgaaaaaagaattcaaaaacagtaagacaggcagcggaaaggagagctgctccaaatggtgagaaatcgtttcttgtttgggttaaaacaaatacccaaagaataacgaatgaaaggccaaagtcagccaatgaagctgtaatattgtttgttctgggtaagacgagcatgtcaccagaaagataggaaacaaaacctaagaaaagtgcaataaacatcacacttaagaaggatgcgtgatagactctgtccaaaatcacatataaaagggcgagagtgaaagcaatctttgaagcaagcgcaatgatatgtttcatttgaccacctaaattgttattttttgaagaaaattcttgggcgtaaacaaatgataaataatgcaattcaaaaccattcataatggtcatgttactattttaaacagtccgtttttgtttacactggtattttttttcagcagtatgaaactttcttatgaaaaaagacgtatatgtggatgatcagctttcaaggggggaatgatttgtggagataaaaggaatcaatcacttgctattttcagtttcgcatttggatacatcgattgatttttatcaaaaagtgtttgatgcaaagcttttggtaaagggaagaacaactgcatattttgacatgaacggcatctggctagcgcttaatgaagaaccagacatcccgagaaatgacattaagctttcttatacccatattgcttttacaattgaagatcatgaatttgaggaggtatcagctaaattaaaaagacttcatgtcaatattctgcctggcagagaacgagatgaacgcgatcgaaaatcaatttattttaccgaccctgacggccacaaatttgaattccataccggaacccttcaagacaggcttcgatattacaaacaagaaaaaacgcatatgcacttttatgatgaaacggccttttgacatcacacaccatatttcatataaggttaaatttaaagaagggtgttggtggagactttatgtttggagaaggtttctacccgattagttcaacgatgccatatcttttgaactgcacaagtgattccgtgaaggagaaattgaaatacatattacattttatatgaagaaagcgagctgttttaacagaaagatgaactaattagactgtgtactaaattttcagtatatttcaattacctcgccccttaataaatatgaaaccgtatccttccacgacctaaaaaatgaaacgtttttaagaagatggcgtctaatattttaaatgttcatattttgataaaagtttcctaaaggaaagaaaatttcttgacttcaacaatcttttggtggataattgtggtgtaaacatgatgttctttttcctcctattcaggctcgcacccaaaagtcagggcgagcctgctttttttgaacaacaaaccccctctccgtaaaggaagagggggttattttatgcatctgatagatcaatagattaatggacggttctgaacacgccaatcactttccctagaatgctgacattctgcaaaatgataggttccatcgttgggttctcaggctgcaagcgaatgtgggtatcctctttatagaatcgttttacagttgcttcatcatcttctgtcatcgcaactacaatttccccattgttcgctgtgttttgctgtttaacgatgacatagtccttatcgagaataccagcatctatcatactgtctcccataatctccagcataaatacatgctcgtctggaggaaccatgcggtctgggagcggaaaatattcttcaatattttctactgctgtaataggagatcccgccgtgactttcccgatgaccggcacattaacgacctggctttgcggaatgtctacttcttcatcaagaatttctattgctcttggttttgtcggatcccgtctgatcagcccttttgtttccaagcgggccaaatggccgtggacagtagagctggacgcaagcccgacagcctctccgatctctctcacggaaggcggatatccttttgatttaacctctgctttaataaaacggaggatatcaagttgcctttttgatagcttcgtcatttttcgcacctcaaaacgtcgattttaagaagattatagcatgattttccttacagtacaaacataggttcgaaaaaacaattgacagaaacgtttgttcgtatatactgaaattataaaaatgcgaacaaacattcctgttggaggttatgatcatgagtaaagaatctattatttttgtcggtctgttcacagtgattttgagcgcggttatccttatgctgtcatatacaagcagcggccaagagcttaatcagtatgttaaaatagaagtccagcaaggcgacacactctggtcaattgctgatcaggtagcagatacaaaaaagataaacaaaaatgattttattgaatgggtagctgataaaaatcaacttcaaacctctgatatccagccgggtgatgagttagtgatcccattgaaaaagaagcatcaggatgcatatgaattagcaactgtaaaatagagaggaaagagagataaaatgaaagcactcatttatgcccgtgtaagcacaaataaagaacagcaggaaacgtcattaaagcggcaggaggaggagcttacggccattgcagcggagaacggtatggaagtggtcaaagtgattttagaaaaagccagcggatatgaaatggatcgggatggtgtatttgagctgcttgatgagattaagaacgctggaattgatgtcattttggttcaggatgagacaaggctcggacggggaaacgcaaaaatcgcactgcttcattgtatttatagagaaggtgtgaaagtctatacaacggctcatagaggtgaactggagttatcggaggctgactcaatggtcttggaaatcgtcagcattgtggaagagtatcagcgaaagattcacaacatgaaaatcagacggggaatgaaacgtgcagtaaaaaacggttttaaaccgcaaaaaaacttaaaaaaccaacatgggaacagtggaaaagaaaaaatagaggtgccaatctctgagatcgtccgcctaagagcgaataaactgacgtttgctgaaatcgcggctaccctaagagggtttggctatgatgtctctaaagcaactgttcaccggcgttttcaggaatacatagagaatgaagagacagcagagtgaatcagttgtaaaactttttttgatctagtactatatagacaaaatgcaataaaggagtttaacatgatttcaaacgcgaaaattgccagaattaatgaacttgctgccaaagctaaagctggcgttattacagaagaagaaaaagccgaacagcaaaagctccgtcaagagtacttgaaaggttttcgttcttctatgaagaacacgttaaaaagtgtgaaaatcattgacccagaaggcaatgatgttacaccagaaaagctaaaaagagaacaaagaaataacaaacttcactaatataagaggaatacggcaatatcgtattcctcttttgcatatactataatcaaaactcttatgtgacaaaattcaacaagtttctctcaaatttaagctgaaacagttgagaaaaagtcgtcagacatttatgatgtaagggtacaacacataaggaaggggatttttatggatacaattgaaaagaaatcagttgctaccattcgcacactgtcaatagacgctattgaaaaagcaaattctggtcacccagggatgccgatgggagccgctccaatggcatacacgctgtggacaaaatttatgaacgtaagtccggcaaaccctggctggtttaaccgtgaccgttttgttttatctgctggacacgggtcagcactattatacagcatgcttcatttaagcgggtttgatcttagtattgaagatcttaagggattccgccagtggggcagcaaaacaccaggacatccggaattcggacatactgccggtgttgatgctacaacaggtccgcttggccaaggaattgccatggcagtcggtatggcaattgctgaacgccatttagcggaaacatacaaccgcgattcatttaacgtagtcgatcattatacatacagtatttgcggtgatggtgatttaatggaaggtatttcttctgaagccgcttcactcgcaggccatcttcagcttggccgtctgatcgtactatacgattctaatgacatctctcttgatggagacctcgaccgttcattctctgaaaacgtgaaacagcgttttgaagcaatgaattgggaagttctttatgttgaggatggaaacaatattgaagaattaacagcggctatcgaaaaagcacgccaaaatgaaaagaaacctacattaattgaagtgaaaactacaatcggattcggttcacctaaccgtgccggtacatccggtgttcacggtgcgccgcttggtaaagaggaaagcaaattaacaaaagaagcttacgcatggacatatgaagaagacttctacgttccgtcagaagtttatgagcatttcgctgcagctgttaaagaatcaggtgagaaaaaagaacaagaatggaatgctcaattcgctaaatataaagaagtttatcctgaacttgctgaacagcttgaactggcaatcaaaggagagcttccgaaggactgggatcaagaggttcctgtgtatgaaaaaggaagcagcctggcatcccgtgcatcttccggtgaagttctcaacggacttgcgaaaaaaattcctttctttgtcggaggttctgctgacctagcgggatcgaacaaaacgactattaaaaatgccggtgattttacagcggttgattactcaggcaaaaacttctggtttggtgtacgtgaatttgcgatgggtgcagccttaaacggtatggcgcttcatggcggtcttcgtgtattcggcggaactttctttgtcttctctgattacctgcgtcctgcgattcgccttgcagcgttaatgggccttcctgtgacatatgtcttcacacatgacagtattgcggttggtgaagacggtccgacgcacgagcctgttgaacagcttgcttcactccgtgcgatgcctaacctttctttgatccgtccagcagacggcaatgagacagcagcagcatggaagcttgcagtgcaaagcactgaccacccaacagcgctagtgcttacacgtcaaaaccttcctaccatcgatcaaacagctgaagaagcattggcaggagtagaaaaaggtgcatatgtcgtttctaaatctaaaaacgaaacacctgacgctcttctcattgcctccggatccgaggtaggtcttgcaattgaagcgcaggctgaattggcaaaagaaaatatcgatgtttctgttgtcagcatgccttcaatggaccgttttgagaaacaatctgatgaatacaaaaacgaagtccttcctgcagatgtgaaaaaacgtcttgcaattgaaatgggctcatcatttggatggggcaaatacacagggcttgaaggtgacgttctcggcatagaccgattcggtgcatctgctccaggtgaaaccatcattaacgaatacggcttctcagttccgaacgtagtgaatcgagttaaggcattaatcaataagtaagcttttgaaagaggatgagtcaaatcatcctctttttcttgtttatccgacaaaaatagtattggctgtttaacagtaatagacaattctttcttttcttcttttgtataatagagagcaaatgaaatgctgctggaaaaggggatgaaaagatggaacgtcactactatacgtacctgatcaaagaggaatttgccaatcactatttcggccgggaatcggttatgtttgagctgtttcaagactatcattggacaagccttgaaaagcagcagtatgaaatgacagagaaacagattcaatatattacacaaccaatcccgattttacatatgcatcagcggttaaaaatgaatttaaacaagacggattacaggcagctggattatatttatagaatagctttgccgaaagcaaaaggccacgcgacgtttatgatgaaggagcacatgatagaaattgtggcttcgggagattacgaggcagaaacgatattctttgaagtgttaagaaaagtaagcccttgctttttagcaatggatttcaattcgaagcgttacggatggctaaatccggtgaaagaaagaaattttgtctaaaaccgaagaaaaagagatgtaaatgttgtataatagcttttggtttagtacactttaaactagacaacatgaaggaggaaataaaatgactttatgggttggcatcctagtgggcgttgttgcattgctcataggtgttgcactcgggttttttattgctcgtaaatatatgatgagctacctgaaaaagaatccgcctattaatgaacaaatgttacgcatgatgatgatgcaaatgggaatgaaaccttctcaaaagaaaatcaatcaaatgatgaaagccatgaataatcaaacgaaataatacgtaaagattatgatatagagaaacatggttataaaataaaaaacccttatacgggttttttattttgcaatcattcatcacccgctactgctcgaaggcgctgcttttgatattgtatgagaagatggtcaagctcctgactgagctctatcgtaatatgagatgtcattccgttcgccatgacaatttgcagcagctctgctctttttttttcaatttcttttaatagatgctctctaatcacagggatgtatcctttcatacattagatcttcaaagtgaatgtttatattatatccatatttatactaattttcaaatgagaaggagtataatgtctcaatgtcaaattaaattatataagttttttctgaaaatagaaatccttcaagtgaaagtgttaaaaaaatgaaatgattttgtcataacttgaaggaatgtcaaatcatgaagggatgatgacatgggagacgtgaattattttttgacattcggtgcgggttttttatcctttatttcgccttgctgcctgccgctttacccagcttttttgtcatatattacaggggtcagcatggacgatgtaaaaacagaaaagctgctgctgcagaaaagaagcctgtttcatactttgtgttttttgcttggcttttcagtcatttttattgctttaggctatggaacatcttttattggcagcctgtttagggattatcacgatgcgattcggcaaattggcgcgttgcttattattttgttcggtttcattacactcggtgtgttccggcctgaggctatgatgaaagagcggagaatccattttaagcataaaccaagcgggtttttaggatcggtcttaatcggaatggcatttgcagctggatggacaccatgtaccggtccgatattaggtgctgttatcacacttgcaggcaccaatccgggctcagcggtgccatacatgatgttatatgtactcggtttcgcggtaccgtttcttttattgtctttttttatcacaaagctgaagtggataaggaagaaccagcttttcattatgaaagctggcggcgttttgatgattgtgattggtgtgctgttattctttaattggatgagcctgatcattattttgctgtcagatctttttggaggctttactggtttttgacggtaaattactttcgtactactactaatccttttgtttttggtacaataagactattatctgtggaaatcgattgttggaggggaatatgacaagagttttagttgtagacgacgccaagttcatgagagtgaaaatcagagagatcttggaagaggcaaattacataatcgcaggcgaagcggcggacggtgaacaagcagctgacctgtataaaaaactgcgcccggaccttgtgacaatggatattacaatgccggtgaaaaacggcataaaagcgcttcgtgatatcttaacctttgatcctaaagcgaaggtcatcatgtgcaccgccatgcgccagcaaagaattgtaacggaagcaattgagctgggggcaaaggattttattgttaagccgtttgaggaaacaaaagtgctggaagctgtaagccgcgttatgggacattaaagtcatttcttttcaaaatggttttttttattgttttggagtatagtatatagtatcaacactccgagaaacaaaggaatgataagtatgatgattatagtttcatcgattattgctgtgttaatggctgtagctgtgatggtggtcagaataaagtcctctgacaagcctgtttcaccaaaaaaaatcattctcccgccgatttttatgagtacgggagcgttaatgtttttatttccggtattttgggtaactggtgcagagtttttggaagcattcactttaggtgtgattttctctatttttctaatcaaaacttctaagttcgaaattaaaaataatgaaatttacatgaaacgctctaaagcatttgtttttatattagtcggtcttttggtgatcagaatcgtgatgaaatcgatcttgagcacatcaattgattatggtgcactgagcggaatgttttggattctggctttcggtatgattgtgccttggagaatcgccatgtatttatcatatcgaaaacttcataacgagctgcagtcatctaatattcaaatgaattaaaaaacctttcctcttgtcaggaaaggttttttatttgagaagggtctgataaggttccaaatcgatttttttgtcccgcagatgcctttttaagaaggtatggtctcttttaggagttgcgagaatatagcctttgatcataagttgctgatcaatctttgctaccttttcttttaatgcaagctcaccgattttgcctgcgattttagcttttgctgcatctctgaacagctctggcacgggcgcagtcaattcatctagaaactgtttgttttcatcgttccataaatgtctgctgttttcaatatagtaatcctgccaatcaagctctgatctgccgtcctcttttggtaaacgctttaaaaactttcgaaacatgaaaaaaccgccgattgataataagactaccatcatgatcacccaaaacagaataaaccataaaaaccatccttccagcatcaatcattcccccttattctaaccatattgtatacgaagagagattagaagaacacagtaaaaaaagaatagaaaaaagtgatagacgtctagtcaaaagagatagtagatcatattctattgtatagtgaatctgctatttggccatgggagagtcactagagggtatttgacgataaatggacggaaaaaaaagtcactttcataataggggatgaaagtgactttttatgtttagctgagaggaaattgaagagaaaaagaagagccatcttctgtttctttattgacggcgactgtgagtatttgattttcgcattcggcttgaatggttttgtcattaaaataaaaaggaagcatcatttgtttttcaaaagtctgtcctgacgatttgactgttaagatgaactcgcatccagaaagggtaactgttacttgtgtaggctgtaaaaaagtcagatccgcttctataatatactgctgacttgtttcatataaatcaataggcaatgtttcgtcgtaccaggcgaaggggtcttcaaaaaattgccgaagccattcatccatactatcgaaatcattcgcatcgttgcgttttgaatggttcatggaagcattcctccacatatcaaccttgctttacatcatatgcggtggattataaatgggtgaacgcataaaaaaacagacactaaggtctgcttttcttacatatcatggcttgagttgtgcttttgtcttgtatggtttcggttctttacttttttgcttccgcttagaggctcaggttggccgggattgtgtcctttaggggcgtttttatgcatatctttacttgtattcttattggtcataaaatgagaacctccttaaaagagttcggtgttattgattggtttttctttttttgttattttggcgttctgcttcagtcagtacaagctggtcgttttcaatatagccggcgcctttgccttggctttttgcgtcattcattccgttaatgacgtgattcgcttttcttttgaccatcattatcacctcaatcataatatggcttcttttattgtgttatatgagagagcgtaaacagtaaaaattaccggtacatttttctcataagtcgaacttattgtatttaataaaaacattgatatttacttatgtatgattttgttttaatatgaaattgtgagaaaattgtgatggaatgtaatgttcatctgagaatgatctgatctgaagggggattttggagaatggcaaacgagcaaaaaactgcagcaaaagacgttttccaagcgagaaaaacgtttactacaaatgggaaaacatatcattactactctttaaaagcgttagaagattcaggtataggaaaggtttcgaagcttccttattccatcaaagttcttttagaatcagtattgcgtcaagttgacggcttcgttatcaaaaaagaacacgtggaaaatttggcaaaatggggaactgccgaattaaaggatatcgacgttccgttcaaaccgtctcgtgttattttacaagacttcacaggggttccggcagtagtagatctggcttcactgcgtaaagcaatggcagctgtcggcggagatcctgataaaatcaaccctgaaattcctgttgatcttgttatcgaccactctgtacaggtagataaagcgggtacagaagatgcattagcagtaaatatggacttggaattcgaaagaaatgcagagcgctacaaatttttaagctgggcaaagaaagcgtttaacaattatcaggcagtaccgcctgcaacaggtattgtgcaccaggtcaaccttgagttcttggcaagtgttgtccatgccattgaagaagacggcgagcttgtaacgtatcctgatacgcttgtcggaacagactcacacacaacaatgattaacggtatcggtgttctcggctggggtgtcggtggaattgaagctgaagcgggaatgcttggacagccttcttacttcccagttccagaggtaatcggcgcgaaacttgtcggcaagcttccgaacggaacaacagctactgacttggcgttaaaagtaacacaagtgctgcgtgaaaaaggcgttgtcggtaaatttgttgaattcttcggaccgggaattgctgaactgccgcttgcagatcgcgcaacaattgcgaatatggctccggaatacggtgctacatgcggattcttcccagtagatgaagaagcgcttaactacctgcgcctgactggccgtgatcctgaacatattgatgttgttgaagcatactgcagaagcaatggcttgttttacactccagatgcggaagaccctcaatttactgatgtggttgaaattgacctgtctcaaattgaagcaaacttatcgggtccaaagcgtcctcaggatttgatcccgctatctgctatgcaggaaacgtttaaaaagcaattagtcagccctgcaggtaaccaaggattcggtttaaatgctgaggaagaaaataaagaaattaagtttaaactccttaacggcgaagaaacagttatgaaaacgggtgcgatcgccattgctgcgattacaagctgtacaaatacatcaaacccatacgttctgatcggcgccggactggtagcgaaaaaagcggttgagttagggcttaaggtgcctaattacgtgaaaacgtcacttgcaccgggttctaaagttgttacaggatatcttgtgaattcaggccttcttccatacatgaaagagcttggctttaacctcgttgggtacggctgtacaacatgtatcgggaactcaggtccgctttcaccggaaatcgaagaagcggttgcgaaaaatgatcttctgattacgtctgtcctttccggaaaccgtaactttgaaggacgtattcacccgcttgttaaaggcaactatcttgcttcaccgccgcttgttgtggcatatgcgctggctggaacggtaaacattaacttaaaaaccgatccaatcggtgtgggcaaggatggtcaaaacgtatactttaatgatatttggccgtcaatggacgaaatcaatgcacttgttaagcaaactgttacgccagagctattccgcaaagagtatgaaacagtatttgatgacaacaagcgctggaacgaaattgaaacaacagatgaagctttatataaatgggataacgattcaacttacatccaaaacccaccattctttgaagagatgtctgttgagccaggcaaggttgagccattaaaaggactgcgtgttgtcggtaaattcggcgattcagtcacaactgaccatatttctcctgcgggggcaatcggaaaagatacgcctgccggaaagtatttgcaagaaaaaggtgtttcacctcgtgactttaactcctacggctcccgccgtggaaaccatgaagtcatgatgagaggaacatttgccaacattcgcatcaaaaaccaaatcgcaccgggtacagaaggcggatttacgacgtactggccgactggtgaagtaacatccatctatgatgcatgcatgaaatacaaagaagataaaaccggtcttgtcgtattagcaggaaaagactatggtatgggatcttcacgtgactgggctgcaaaaggaacaaaccttctcggcatcagaacggtcattgcagagagcttcgaaagaattcacagaagcaatcttgtattcatgggtgtgctgccgcttcagtttaaacaaggtgaaaatgcggatacactcggcttaacgggtaaagaagtcatcgaggtagatgttgatgaaacagttcgtcctcgtgaccttgtgactgtaagagcaatcaatgaagacggcaatgtaacaacttttgaagcagtcgtccgctttgatagtgaagttgaaattgattactaccgccatggcggcatccttcaaatggtgcttcgtgaaaaaatgaagcagtcctgatgaatcaataggaagagaaggcatttcgctttctcttctttttataacacaatgtgctgcggaggtggcatatgctgaaaaaatggctcgcagggatcctgcttatcatgcttgccggttatacgggatggaatttatatcaaacatacagcaaaaaagaagtcggaattcaagaggggaaacaagcacctgatttttctttgaaaacgctgtcaggagagaaaagctctttacaggatgcaaaaggcaaaaaagtgctgctcaatttttgggcaacttggtgtaaaccgtgccgtcaggaaatgcctgcgatggaaaagctgcaaaaagagtacgccgacaaacttgcggttgttgcggtaaatttcacttcagctgagaaaagtgagaaacaggtccgagcgtttgctgatacgtatgatttaacattccccattctgattgataaaaaagggatcaatgctgactataacgtgatgtcatatccaacgacatatatcttagatgaaaaaggtgttatccaagacatacacgttggcaccatgacaaaaaaagaaatggaacaaaaactggatcttgattagattcagtttttttatgctcagatatgcttacaagttttcagaattggaaaaaataaaagaatatgcggaggtgagaagcgtgaagaagatgagaaaacgttcttttcatgagctcgtcatggaaaacaaaaaagagctgatgaccaatacagagtatttaaatcagcttgaggaaaagcttgaacagcgatttaagcaaaaataacctttaatttgtattcatgtttacccctccttttgagaaacctatctgttgaggagggataaacatgggaaacaacaagaaaaacggtcagcctcaatatgctccaagccacttgggtacaaagcctgtaaaatataaagccaataaaggggaaaaaatgcatgatacttcaggacagcggccgattatcatgcagacaaaaggcgagtagcgaaaattcgagtttatttctaggaggtacatccgaatgacaaagaaccaaaatcaatatcagcagcctaatcctgatgatcgctctgacaatgtggaaaaattgcaggatatggttcaaaatacaattgaaaatatagaagaagcagaagcatcaatggagtttgcttcaggagaagataaacagcgtatcaaagaaaaaaatgcaagacgcgaacagagcattgaagcgtttcgtaatgaaatacaggacgaatctgcagcgagacaaaacggataccgttcttaaaaaaccagggaaacctggtttttttctttctgatttgattatggtaaaatggggctaaattgacgttaagggagcagagtaatcttgcatgtatcaaaaaaagaaatagaagtgcgttatgcagaaacagatcaaatggggattgtctaccacgcaaattatcttgtgtggatggaggtcggcagaacggccttaattaaggacttaggctttttatatagtgatatggaaaaaagaggcgttctgtccccagtcgttgatatcaatatttcctataaaaagccgcttcattacggagaaaccgcggttgtacatacatggatagaggaatataacggatttaaaaccgtctatggttaccacatctataatccggccggtgagctttccatcaaagccacctcatctcatatttgtgtggataaagaaagctttaagccaattcaattccgcaaagcttttcctgattggcacacagcatatgaaaaggccaaaaaatagggaagtgaacgggatatggcgtttggtgtgaaacgggaggaacttaaccgatggaaacaagcagtgaaaagaggagaaatcgcatttttaacacattactggctggatgaccgatttccggaagcaaggactgtaacaaaagccggctgtgcagacattgataagctggttcagtggggggcggcgtacgggttaaaaaaagaatggatccataagaaaagtgaatttcctcacttcgatctgctgggggaaacacaaaaatatattttggaacaagaaaacctaaccgatcatcttatacgatttcatttgtaaaaaaagaacgcacatgatgtgcgttcttttttattggtattcaaaaaccggttcatcagcgtcttctgaatagctgacgagaaggtcgtggttatcaaagtaccataaatcactttcttcaataaagaaggtaatgccgtcagcttctgcagtgactccagcctcttgtggggcatctttcgctacaccgagagaaaaacccttttgaacgttgctgcagcctccatagcggacgaaaaagcgaacctggtctccgctttccaaatcgagttcttctttataccagttcaatgcgtcttcgttaattgtcatattcataacagaacacccctttgttcttcatttgaattttctctattataaacgtattaggctattctgtgtcaaaagagaagttttttaagcttataaccattttactttaggttctgttttattgataattcgtttaatgttcgctcggtgtctgtatatcacaaaaatagtgagcagggtaacgacaatcaataaatacgtatcatggacaaagaaactatatataacagtatagatccctgttaacatcgatgagagagaaacaaatttagtcaagtataaaaagatgaagaataccgcaaccatcgtgataaataacaggggtgcgtaaaatagcaaaacgcctcctgatgtcgccacggctttaccgcctttaaatttggcgaagatgggaaacacgtggcctaaaaccgcaaagactcctgcaagaagcgggtgaatatcaacatgcatgagaaaaggcaatgcagttgccagtgtccctttcaaaatatctccggctatgacgaccgaaccagcttttacacccaatgtacggaatgcattggtagcgcctaagttgccgcttccgtgctcccgaatatcaattcccttggcaagcttgcccacaattaagccagatggaatgctgcctatcaagtaggccaaaataatcaataaagcaattaacatctacatttctcctttttcaaattcccttctttttattttaacatgagatgtcatgatctgatgataagtttttttgtaaagtttgcttacaaatccaatcaaacatgcatcatattttgatttctcctgttttgatcgtgtaaaataagtaaaaaaggagtgacacacgatgcaaaacccttctaaagcggaaattaaagagattcttcaaagaagcaaacgtatagcggtagtagggctttcagaccgtccggatagaacatcacatatggtttcaaaagcaatgcaggacgcgggttatgaaattatccctgtgaacccgacaattgatgaggccctaggtgtcaaagccgtttcatctttaaaagagattgacggtccgattgacatcgtaaatgtattccggcgctcagaacagcttcctggagtggcggaagattttttagagacagatgcgccagtattttgggcacagcaagggctagttaatgaggaagcataccagatgctaaaagaaaaaggcagaacggttatcatggatctgtgcataaaagtggcacacgctgtaacaaaataggtgcagaactgcaaaaatccttgtaaattcaaggatttttgctttttaattttaagatattgtttgcgtattacggtgaaacagatacaataaagcttgaacagctttttttgaataccttgtccagctgggtttcggccgttcgatttgcgaaggtctgctgctttatatataataaacaaacatacgttcttatggtgtaaaaacagcactagccgatgttttgagaagaactgattcgttagctctatgttgcgattgcaaacatattggttataatgaggagtccaaggcagtactggctcgaggcgaggtttataaaaaatatcttatatacaaatgatgtgtaacactgaaaaagagaaagacaatgttagtttttgaaaggggtttgtacgtttggctagaaaacagcaatttgattacaacgaagatgccatacaggtgctcgaaggccttgaggctgtcaggaaaaggccgggtatgtatattggctctactgacgcgcggggtttgcaccacttggtttatgaaattgtagataactctgtcgacgaggtgcttgccggccatggagatcacataatcgtcaaaatacataaagacaatagtatttctgtacaggatagaggccgcggcatgccgaccggaatgcataagctcggcaaaccaacccctgaagtgattttaacggtgcttcatgccggaggaaaattcggccaaggcggctataagacaagcggcgggctccacggagttggtgcatcagtcgtgaatgctttatctgaatggctgacggttaccattgagcgggacggttttgtctatcagcagcgatttgaaaatggaggaaaaccggttacatctctcgaaaagatcggcaaaacaaaaaagacgggaactcttacacactttaagccagatccaacgatgttcagcacaaccacttataattttgaaacgctctctgagcgcttaagagagtctgcgtttttgttaaaaggactgaaaattgagctgattgatgaacgcaatgaccagcatgaggtcttttattatgaaaacggcatagaagcgtttgttgcttacttaaatgaagaaaaagacgtcttgtctgaagtggtctcgtttgagggtgagcatcattctatagaagtggactttgcgttccagtttaacgatggttattctgaaaatattttgtcgtttgtcaacaatgtcagaacaaaagacggcgggacgcatgagtcaggtgcaaaaactgcgatgacgcgtgcttttaatgaatatgcgcgaaaagtggctttgctgaaagaaaaggataagaaccttgaaggcaccgatataagggaagggctttcagccattatttctgtccgcattcctgaggagcttcttcaatttgagggacaaacaaaaggaaagctcggtaccagtgaagcaagatcagcagttgatgcgattgtttcagagcagcttgcttactttttagaggaaaatcgggacaccgcaacgcttcttgtcaaaaaagcaatcaaggcgagccaggcgcgcgaagcggcacgcaaagcccgtgaagaagcaagaagcggcaaaaaacgaaaaaaatcagaagcgactttaagcggaaagctgacgcctgcgggttcaagaaacccggcaaaaaatgaattgtatctcgttgagggagattcagcaggcgggtcagccaagcagggaagagaccgcagattccaagcggtactgcctttacgcggtaaagtcattaatacagaaaaagctaagcttgctgatatctttaaaaatgaagagatcaatacgatcattcatgcgatcggcgggggagtcggggcagatttctcaatagatgacatcaactacgacaaaatcatcattatgaccgatgccgatactgatggcgcccatattcaagtgctgcttcttacctttttctatcgctatatgaaaccgctcattgagcatggcaaggtgttcattgcgctgccacctttatataaggtcagtaaaggaagcgggaaaaaggaaatcattgaatatgcatggtctgatgaagagatgggtgatgtcctgaaaaaagtcggcaaaggctataccattcaacgatataagggtcttggagagatgaacgcagaccagctgtgggaaacgacgatgaatccggagtcccgcacacttgttagggtcaaaattgacgatgcggcacgtgtagaaagacgtgtgacgacgttaatgggagacaaagtagagccgcgcagaaagtggattgagaaaaacgtcgctttcggcttagatgaagaaagcaatattttagaaaatgaaaacttatcggtcgctgaggaggtttaatgattgtcacagccagaattatttcatgatttaccattagaagaggtgatcggcgaccgttttggacgctacagtaaatatattattcaagacagggcgctgcccgatgcgagagacggattaaagccggtacagcgcagaattctgtatgcaatgcatacagatggaaacacgtttgataaaaacttcagaaaagcggccaaaacggtcggtaacgtcatcggtaactatcatccgcacggtgacagctcggtttatgaagcaatggtgcggatgagccaggattggaaagttcgtaatgtgttaatcgaaatgcatggaaacaatggaagcatcgacggagatcccccggcagccatgcgttatacagaggcacgattatctccgattgcatctgagcttcttcgggatattgacaaaaacacggttgaatttgtgccgaacttcgatgatacaagcaaggagcctgtcgtactcccggcgatgtttcctaacctattggtcaacggatctaccgggatttcagcaggatacgcgaccgacattccccctcatcatctgggagaagtcattgatgctgtcattaagcgtattcaaatgccatcttgctctgttgatgaacttatggaagtcattaaagggcctgattttccgacaggcggtattattcagggcgttgacgggataagaaaagcttacgaaaccggaaaaggaaaaatcattatccgcggaaaggctgaaattgaaacaatcagaggcggacgagaacaaattgtcattactgaaattccatttgaagtaaataaagcaaaccttgtaaaaaaaatggacgagttccgtattgataaaaaggttgaaggcatctcagaggttcgtgatgaaacggatcgaacagggctgagagtggtcattgaactgaaaaaagaagctgatgccaaaggcattttgaatttcttatacaaaaatactgatttgcagatcacatataacttcaatatggtggctatccataaccgccgtccgatgctgatgagcctgccgtctattttggatgcatatatcggacaccaaaaggaagttgtcacaaaccggtccgtttatgagcttcaaaaagcaaaagacagacatcatatcgtagaagggctcatgaaagctttgtctattttagatgaagtgattgcaacaatccgttcttctagcgataaacgtgacgctaaaaacaatttgatcgcgaaatatgaatttacggagcctcaggctgaagccatcgtgtcattgcagctatatcgtttaaccaatacagatattacagcgcttaaggaagaggcagaagagctcggtaaaaaaattgaagagctcgaatctattctgagcaatgataaaaaactgctaaaagtgattacaaacagcttaaaagcattgaaaaagaaatatgcagatacgagacgctccgtgattgaagaaaaaattgaagaaattaaaatcaatctcgaagtcatggttgcatctgaggatgtatatgtaaccgttacgaaggatggttacctaaaacggacgagccagcgctcatttgccgcttccaacggtcaggacttcggaatgaaagatacggacaggatgctgcatcagtttgaaatgaatacgacagacgtgctgctgctctttacgaacaaaggaagctacatctattgtcctgttcaccagctgcctgatatcagatggaaggacatgggccagcatttttcaaatctgatcactattgaccgtgatgaaacgattgtaaaggccataccgataaaagaatttgatccgtcggcatatcttctattctttacgaaaaacgggatggtgaaaaagacagagctcacccattataaagcacagcgttattctaaggcgcttgtggccttaaatctgaagggtgaagatgaactgattgatgtacatgtaacaaatggggaaagccagatctttatggccactcacttagggtacggcctatggtttggagaagacgaagtgaatgtagttggcgcacgtgcggcaggtgtcaaagggattaacttaaaagaggatgactttgttgtctccggtgagatccttcagcaatctgattcaattgtcttgttcacacagcggggagcggtaaaacgcatgagtctttctgagttcgagaagacatcccgcgcaaaacgcggtgtcgtaatgctaagggaactgaaaaagaatcctcaccgtgttgtagcactgttcgcttgcggtcttgaacagcgactaatggcagaaacagaaaaaggcgacagaaaagaactgcaggcaaaagagttgcggacaaacgacagatacagcaatggctctttcttttttgatgaagaggaatcaggcaaggttacagctgtttggcgacttcatacagaacaataataaaaaacccgctcatatagtatgagcgggtttcgtttgttttttatcagctttcatggttggtgaatagatctgttacagcatgaatgacttcaatcccctgccatacaaataaattcagcgctgtgaaagaaaataagcctaaaatcaccattcttaagataaacaacatgtttaacagcctcctcatattttcgttacataatcgggtgatgttgaacatgaagtttgccgaaataagacgattgataaaatttggccagtataaagctttttttccgctgacgtctgcgggagtatcccgtacttttgctttcagcggtcagcagcagaacagccattgcccataaagcggtcagcgtaaatgcccctgtgatggatttcttctcatcatcagcattttggccgactttcatctcatgcatttcctgctggtcggctacggctttataatgatggccgatatcaaaggcgtggggaattgagaacaaatgaaaactggcaatcgccaagaataagatggatgctttcaatatcgttacttttttcaaatgatctccccctcctttaatattactgaatatttttataataataccccaatccatcctaaaagtaaacgtgatttattaaatttaaaaataaatttaaccttgttaagtatatatctttttgcttatttttgaaagagaaaacttcttttattagcgtatgtatacccggtttatggtgtgaataaaaacatattttaaatgatatgtttgttgtttagggtttattactttatttatgtgttaaatcaaagggaaaggcaagagaatgggaagaaatgattacattgttaatagggcactcttttttaaaagccagcttgcaaggaatgtttttattcgtaggaaaataatagagaaggggtcgacagagtaacatctggctacgacaatattcttctcgaaaaaacttcctaattcgtcatattgtgatataataaaactcgttatgttaaaaaatctaacatcaaaatcgaattcgtgttgaattgatgaaaacgggaggtaaatatggagtcttttttcaatagtttgattaatattccaagtgatttcatctggaaatacctattttatattttaatagggcttggattattttttaccatacgttttggttttatccaattccgttattttattgaaatgttcagaatagtaggggagaagccggaaggaaataaaggtgtttcatctatgcaggcattctttatttcggccgcatcccgagtcggcacagggaatttgactggtgtagccttagcaattgcgacaggcggaccaggcgctgtattttggatgtgggtagtagctgctgtaggtatggcttcaagttttgttgagagtacgttagcgcagctttataaggtgagagacggggaggatttccgcggaggcccggcctactacattcaaaaaggtcttggagccagatggcttggcatcgtttttgcaatcttaattaccgtctcattcggcttgatttttaacgctgttcaaacaaatacaattgctggagcattggatggcgcattccatgtgaataaaatagttgtagccatagttctggcggttttaactgcgtttatcattttcggcggtttaaaacgtgttgtcgctgtttcacagttaattgtgccggttatggcaggcatttatattcttatcgctttatttgttgtcatcacgaatattacggctttccctggcgttatcgctacaattgttaaaaatgctttaggttttgaacaagtcgtcggcggcggaataggcggcatcatcgttatcggtgcgcagcgcggacttttttcaaacgaagcaggaatgggaagcgcaccaaacgcggctgcgacggctcatgtatcccatccggcaaagcaaggctttattcaaacattaggcgtatttttcgatacatttatcatatgtacgtccacagcatttattattttgctgtacagtgtaacaccaaaaggcgacggcatccaagtaacacaggctgctcttaaccatcacattggaggctgggcgccgactttcatcgcagtcgcaatgttcttgtttgcattcagttcagttgtcggcaactattattatggcgagacaaacattgaatttattaaaacaagcaaaacatggctgaacatttaccgtatcgctgtaattgctatggttgtgtatggatctttatcaggcttccaaatcgtttgggatatggcggacctctttatgggtatcatggcgctgatcaacttaattgtgattacgctgctgtcaaacgttgcttacaaagtgtataaagattacgcgaaacaacgtaagcaaggacttgatcctgtgtttaaagcgaaaaacatcccagggctgaaaaacgctgaaacatgggaagatgagaaacaagaagtataatataaatataatgaaaaagctgcattcaatagttgaatgcagctttttcattattggaaataaatttaatttttcgactcgaatgaaaaatgacgtgtaaagtcccaattcagtccagttttctttgttctatatgtgtcatgtgtgtcttattcattggaggtagagcaaattgacaggcttttaaacctcccaaaaacaagaaattaggttgatagacaatcatgagaaagatttttacaatgagttcgtgctcataagaagtgtagagccaaaatgatgcgaaggaggaaaagatcagatatgaaacggtcaatctctatttttattacgtgtttattgattacgttattgacaatgggcggcatgatagcttcgccggcatcagcagcagggacaaaaacgccagtagccaagaatggccagcttagcataaaaggtacacagctcgttaaccgagacggtaaagcggtacagctgaaggggatcagttcacacggattgcaatggtatggagaatatgtcaataaagacagcttaaaatggctgagagatgattggggtatcaccgttttccgtgcagcgatgtatacggcagatggcggttatattgacaacccgtccgtgaaaaataaagtaaaagaagcggttgaagcggcaaaagagcttgggatatatgtcatcattgactggcatatcttaaatgacggtaatccaaaccaaaataaagagaaggcaaaagaattcttcaaggaaatgtcaagcctttacggaaacacgccaaacgtcatttatgaaattgcaaacgaaccaaacggtgatgtgaactggaagcgtgatattaaaccatatgcggaagaagtgatttcagttatccgcaaaaatgatccagacaacatcatcattgtcggaaccggtacatggagccaggatgtgaatgatgctgccgatgaccagctaaaagatgcaaacgttatgtacgcacttcatttttatgccggcacacacggccaatttttacgggataaagcaaactatgcactcagcaaaggagcacctatttttgtgacagagtggggaacaagcgacgcgtctggcaatggcggtgtattccttgatcaatcgagggaatggctgaaatatctcgacagcaagaccatcagctgggtgaactggaatctttctgataagcaggaatcatcctcagctttaaagccgggggcatctaaaacaggcggctggcggttgtcagatttatctgcttcaggaacattcgttagagaaaacattctcggcaccaaagattcgacgaaggacattcctgaaacgccatcaaaagataaacccacacaggaaaatggtatttctgtacagtacagagcaggggatgggagtatgaacagcaaccaaatccgtccgcagcttcaaataaaaaataacggcaataccacggttgatttaaaagatgtcactgcccgttactggtataaagcgaaaaacaaaggccaaaactttgactgtgactacgcgcagattggatgcggcaatgtgacacacaagtttgtgacgttgcataaaccaaagcaaggtgcagatacctatctggaacttggatttaaaaacggaacgttggcaccgggagcaagcacagggaatattcagctccgtcttcacaatgatgactggagcaattatgcacaaagcggcgattattcctttttcaaatcaaatacgtttaaaacaacgaaaaaaatcacattatatgatcaaagaaaactgatttggggaacagaaccaaattagttaagcttttttttggcggacatcagtaacgatgtccgtttttatcatctaataggaggtttgcgttgtggatgaaatactgaaacagtatatggtgctgtataaaaaaatgagtaatatgataaatggtcccgactatccaggtaaggaaaaagacatccagcatcaaaaagatcagatcgaagtttacgaaaaacagctgcagcaaggattttctacagattatgactatgatgtgtttgctgattctgttatcaaatgcgcatatggcgatatgacgctggaagatttagaagccgtttattatggattgacaacaccatttttttgatttgtcattcagcagtaaaatttcaatttctgtctcactaacttaagtatactttgatattgagacagaaatttatttattttgtttacttcctagaatatatattatgtaaactagaaaagatgaagattaaagctttgctgtttttatgtacatcctttcttcttcctgtaattcagcaacaaaataaaaaagcgatttcccaatcggaaaatcgccaattcagacactctattatttatgagtgtctttgtgctcttaacgatttacaacaaatgttgttacgctttgagctggaagatgggcccaaaaatgattgcctgatacagtgagattcgttccaggttgtagattgctgctgctgctcgtgatccatctagatacgtttgaagcagatccattctgcaaaacaaagttttggttgacccctgtgttgcttttattgatagcaacaataacgaccttgttgtcacctttataggctgacacgtaaacgttcgcattagggtttttcgttgcatcaatccttacatagccgggacgcacaaactttgagaaatgagccatattgtagccgcgtttgctgatcgtaccatcttctttcataggtccatatgatcttcgaatgtaccaccatacataagcttgaaagtccccctctaccatcgcattgtgaatatgctgtgaaacatccaatgcctcaggccatcgatccgccgagttgttatcactgtttggatagtatacttccgtcatccaaaggtccttccccgctcctttttgtttgaaaagaggataagggaattggctgacctgggtgccgtacaggtgagttccgagaatatccatattggcaagagcctgcggatcgttcaagatcgggtccgacaaattcttcaagtattgaaatgactcaggcgcaatgacgcgggcattgatcgagccggcgttttctctcataaagcgaagtatttcttgcggcgtccaccacgtccactcgtgagcgtaatcaggctcgttttggaccgaaatcgcgtaaagattcacaccattattcttcatgaaggtaacaaaatcgttaagatgctgcgcgtatgctgcgtacttgttgtatttcagccgcttagctgatgtgtcaccattccgattgaaggtctcaaccatatcacttggaggattccagggagatgcaaaaacgattgccccatgtttgaccgcactcttggcagtctccacctctttataccaattatttcgattttcatctacatgaattcttaagattgaaaatcctaactggttctgtccattgccaaaagcagtttctctttgagctgctgtaagatccccagcccaagcgggatgattcatccctccaaaaccgcgaatcacttgtttctctgcagatacattaactgttacatcactggctgccaaaacttcagtagcgcctggccctaacatgactgacagcatagtgaaacatactaatagtacacaaattgttttttttatgcgtggaatcatttattcctctccttcgtcatgtgtcttttacggtattaaaaaatctgcatggcatatccataatggcgggctgttccggtgatggcccgtacttcacccgcctcgtttttaagcggtcccattacgagtcctatctttgcgtaaactgccagtaatcaaaattaaacaagtttcctgtacctgttccggtaaatacaaagaatactttgtgcacaccggttgccccgcttacttcagtttctatttctctccacgtttgcgctccacctgtggaaggtacattcagagttccaacaagcttaccatcagcactgtcgaggcgcacttctatttttccgcctaaagtggatgctacatttgctttaaatgtcctggcaccgcccgctccgaagtctgcatttcctacagcaatccagtctccattttgaatgcttgttacatgctgattatttactggcccgccgggtgctgtggacttctctgtcaaaatgcgtccattccaagcaaacgtttcagcttctacccggttataaggattcaaattggaaagctgtgttacacctgcataatttgctgctacctcttggatggatccatctgggttatgcaccagcttattaatatggggagaacggtatcctttgccggccccgaacagagcggaactgacagtttgcgcatggtacaccacataccactcgtttttaaaattgaaaacagcatgatggttgtttccgccgcctccgaaaaatgcacccggatttttcaggaagtgccctctatatgtaaaggggcccatgggacttgaactggtcatgtagccgatctcacccgggggtttatcggccggatgtgtgccgccgaaattgatgcaataggagtaataatatgttccgttatacttgtgcaatccggaatcttcaaacatgaaaggcgcatcaattgtagatgcacttccctcaacactcgtcatatcaggccctaattttatgacccttgccgttttaggattggcccattgtccctgcgttggatttgaaccgccaggaacgcctccgccggcatacaggtaaccggttccgtcgtcatctacaaatactgccggatcaaaaagccatacaacacctgacattcctggcgtacttggcgttacgagcggttttccgattgggtcggtccatggaccaatcgggctgtctgcggtgagaaccccgatacctccgccgctgtttgcgaaataaaggaagaatttatccttgccattaatttttttaactgcgattgacggtgcccaggatgcacctgcccattttgcaattccacggcctccattagctccattggcacctgctaccggaatggctccgtggtctgtccagttcaccatatccgctgaagatatgacgaatactctattcaaattggcaaatgaattatctttaatcgttccgttgctattatattcatagtcatcacttgacatataaatgtagactcttccgttataggtcagcgcaatcggatctgctcctaaatgatggtcgataagcgggtttgaattccctatatgttttgcaattgtagtacttgtggcagcatacgcagacttcccagataagcagctcaataataaaactagaatccataaacatacgctacactttttcctcatcacttcacatcctcctttttctttaaaatgggggattttcttttggaatttgatgacaacaggtcacgaagattgcacgcataaagtagccggaagctgtttagcaatgttcccagttgttctgaaagctcatcttcatgtgtctccattctctcttttcttcgaggagatcgcaccactccttcaaaattgttcaaaaaaactttcccattcctagcgaccattgtccagaaaataaaaagacaggattgttcatggcctcccactaatcacattgaacggagattacatcattatccaagatatccctttatctaacatcctacatcattaaaaaaattgtgtatagaaacttttggaggagttagtgttcgattctacaaaggaactggatacatttattcattgataagatggggctaacactccttttatatttttatgtaaagatagttttcagacacaaaaaaacagccgtcaatgcggctgttttttcaagagtataagaactattgagcggtatacccgctttttcatgttttgttcatattttattaattgtttattcaacactgtccgctatagtaatccatatcaacaaatatgactgccactcgcatcttttatgaagggaggttcgttacgctgaaagaaaaaataaagacattaggccgtttttgcaccgtaggcgtcggcaatacgctgatagattttggtgtcttctttcttcttaccgcttgtcatgtctcttatctgccggcgcagatctgctcctatactgcaggtatcgtcaacagctatgtgtggaaccggaattggacgttttgtgtgaaaggtaaggctgacgggaaagagatcgtgcgttttctcatgattaatattgccgcgtcggggatcacctttttgctgctttatttgtttcaaaattgcggctgctcgcttttggtgagtaagctcgccgccactatcggcggaatgatgatgaattttatcggaaaccgaatctgggtatttggagattcgctgaaaaacatacaggatcaggagtgaagatgaatgagaaaaaaagtgagaaaagcggttatacccgcagcgggtttaggaacgagatttctgccggcgacaaaggcgcagcctaaagaaatgctcccaatcgtcgacaaaccagcaatccaatatattgtagaagaggccgcagagtcaggaattgaagatatactgattattacagggagaaacaaacgctcgattgaagatcattttgatcggtcggcggaattggaattcaatctccgggaaaaaggcaagacggagacacttaaggaaatgcagcagattgccgatttggccaacattcattacatccgccagaaagaaccgctcggattaggccatgcggtgctgtgtgcggagcattttatcggagatgagccttttgccgttctcttaggtgatgatattatggtgtctgaaacaccggctcttcggcaattaatggatgtatatgacgtttatggcacagaggttgtcggtgtacagtcagttctccctgaggatgtcagcaaatatggtattataaatacatcagggtctcaagggcatgtatacgaagtgaacgatttagtggaaaagccttctcctgaagaagcaccttcggaaatcgcagtaatgggacgttatgtgctgaattcttcgatcttctccgttttgaagacaattggcagaggcgcgggcaacgaaattcagctgacagatgcgcttcgtgaggtttgccgtaaggagccgatccatgcccggctgctggaaggaaatcgatatgacattggcgataagctgggctgttttaaagcgagcaccgaaatcggcttaatgcgtcccgaaatgagatctcagcttttggcctatttagaagatgtgatcaaacgggaaacgaaagaaatgctgcggtaaaaaaattgtaaccatcttgctcgtcaatcagtcatataatagtgaaaaagattaggacaggttgtgaagaatgtgggcagtttgataagcgaaattttaacatggctgacgaacatgggatatgcgggtattgcgattgggttaatgattgaaatcattccgagtgagattgtattagcttatggcggctatatggtatcggagggcacgattggatttattggcgcaattattgcgggtgttatcgggggcaccattgcccagatctttatttactggatcggtcgctatggcggcaggccatttctggacaaatacgggaagtatttattgattaaaaagcatcatatcgatatgtcggaaaactggtttcagaaatacggcgccggagttgtcttctcggctcgttttataccggttgtcagacatgccatatccattccggcaggtattgccagaatgccttttctcaaatttgtggtactgactgtgcttgctatcattccatggtctatcctgtttgtttatttaggcatacagctaggaagccagtgggatgatgttgagaatatagcaggcacttatacaacaccgattatgatattggctgttgtcgtgatagccctttattttgtgattaagaaacgtacagccatatttaaacgatagctagcggatatgcataggggtgactgacgctcccctatgcatatttttttacttgcgatgttgatttgccagcttcagattctccgctaaaaatgcgacaaacacttcatcccgcacgagcgatgcggcataatttctcttaataaaccattctgcctcttcaaacgctgcgaatgtttcgtcttgggtttctccgttaatttgaatattccattcgttgtctaaagggaaaagaaaaaatctcatttgtgcgcgattttcatataatgatccattcgcagatccctttagattatagatgttacggaaggcatccggccgtacaggatcaatacggaaagcttcagctacaaacaactcgtatacttcatcggttattgaacagccggacgcttttgcatgccctccgccgccatatcggccggcgatttctgacacatcgatgtaatcatgaatggtgcggagactgactcgttttgaccccatgctcaaaatcgcaatgtaatcgaggtgcgggttatctttccctagcctgttccccagctctgaatggtacgattcagcgtgaacgatgcctacacagtgttcgtgaacaaaggtttgtaccatttcccttttctttctgcggaggtagcgctcgattttttcgtcttctaaatcaagcagtttttcttcaaaatcatcgaagaaaaattcgtcatgcgtggaaaggcgctggatcatttttgcttcaaattcatcgattgacagcaaaaagaaaagatcattaagccgcttcgcctgtttttgatcgtaccgctcccactcccatgtatcgtattggcggacgagctctgtgaattgatctaaggcgtttgtcggtttcatgaagccattttcaacgagatagccatataaaagcgatgtcgcggatgtgagccttccatcatcgtattccacctggacaaatccccattcatgctcattcaaatgaagggctgttttatgatggtctatgagcttcactttgccccctgcatgaacatactcattcaatctctcttcgttttcttcattgacggcgagatcggtgatgaataacgcgtcctgtctgttgctctccttcgctttttctaaaaagtactgcacctgtgcgtttaagccgttgacagagttataccggacctctacgtcttttccgaacgccaattttgctacgattccgcatcctactccgtccaagtcgttatgtgaatataaatgatacacaatgtaggcccctttttatgataaactgacaattgccgctagaggtgcggcagcctttatttactattctaaaaaaccaagcgttttatgcaatggtaattagttgacataatgttgttattgtaaatatacaaaggagcgctttttttgcgctcctaagttcttgcttttacaccggataaaccggatgctttcgattggtaaatgtcatttcctttgtcatgtatgccttgagccgtttggccagctcatcacgcagcgaattggctgggataacagcatcaatgatcatttctgaagccagacggtagatattgatgtcctctttgtattcctcccgtttgctgctgataaatgcggctctctcttcttctggcagctcggcgatttttttagcgtagacagcgtttacagcggcctcagggcccatgacggcgatttgggcggttgggagcgctagacagcaatccggttcaaatgccggccctgccattgcatacaaccccgccccgtacgcttttcggacaatgacagagagctttggaacagttgcctccgacatcgcagaaatcattttcgccccgtgtctgataatcccagcctgttctacttttgtgccaatcataaaaccggggatatcggctaagaacagcaatgggatatgaaaagcgtcacataaggtaataaacttagccgctttgtctgctgaatcgtggaataagacgcctccttttaccttcggctggtttgcaacaatgccgacaggctgtccgtggattcgtgcgaggcccgtcaataattccggtgcaaataaggctttgatctcaaaaaatgagtcttcatctatgacccgctcaatcagctcatgcatatcaaaaggtccgttttgattttgcggaatgacgtcggcaagcggagttttgaagtgttttggcgggcgtttctcatgaatgggcgctttttcttgaaaatttgccggaaagtaagacaaataagcccgcgccagctgtatggcttcttcttcagtttctgcaagaatatctccgcagccggagattgagcaatgcatacgggcgccacccatttcttcaagagacactttttctccaataaccatttccgccatccttggcgagcctaaatacatggaggcgttaccgtctaccataacgacgatatcacagaaggccggaatataagcgccacctgccgcagatggtccgaaaagcagacagatttgcggaatgcgtcccgataatttgacttgattgtaaaaaattcttcctgcaccgcgtctccctggaaagacattgatttggtcggtaattcgggcgcctgccgaatcgactaaataaatgagcggacagtttaatttttcggcggtttcttgaattctgatgattttttcaactgtttttgctccccatgaccccgctttcactgttgaatcattcgccatgacgcaaacggtttggccgccgattttgccgatagcggttacaactccgtcagcgggaagcccgtctgacatacattccgcaaaaaaagcgtcttctagctcaatgtcatcgtcaaagagaagggaaagccgctctctgacaaagagcttgcctttttcccgattgctttgatgatacttttccgctccgccttttcgaatccgttcagcccgttctgttcgttccttttcataatccatcagcattgcctcccttttatattcccttgtatacggcccgtcttttttcttgaaaggcctgaagcccttctctcctgtcttttgtcgggatggtttgttcatacgctttttgttcaatcgcaaggcctgtagcgagatctgtctccaatcctttattgattgcaaatttagcctgacggacagcgatcggtccgttggcagaaatggctgcggccagttcctctgcttttggcataaggtcacaaggagccgtgacatgctctacaaggccgatttcttttgcttcgtgtgcggtcacgcgtctgcctgtataaatgaattcttttgcttttcctctgccaatcagccggggcagcctttgggtccctccagcgcccgggataatagctaaccctgtttccggaagtcccagcacagctgattcagttgcgattcgaaggtcgcatgccaatgccaattctagtccgccgcctaatgcgcttccatttatcgcagctatgaccggctgcggcaaggcatcaagtaaagccgccgttctttgaatgagagatacactttccagaacctgatcttctttcagttttatccgttcctttaggtctgcccctgcacaaaacgctttttcaccggtgcctgtgaggatgacgcaacggatgtttgagttaaattcaatttcctggataatcatttgcaggtttctaagcatttccgctgaaagagcatttgctgcctgaggcctgtttaaggtgatcaacgcaatatgttcatttttaacagtaaaaagaatagaatctcccattgtatgcgtcctcccttttatcaagatgatttaaacacctgtaaatttctgctcggcagcggtttgcccattttttcttcaatccatttggccgcagatagcagtttttcgagctttacatttgttttgatatccatctgttcaagcatgtacacgatatcctcagttgcggcgtttcctgatgaacctggcgcatatgggcatcccccaagcccgcctgccgagccgtcgaacaccgtgatgcccatttggagtgctgtgaccatgttggccagagcggttcctctcgtatcatgaaaatgcagggcaatttgattagccgggaatcgtgccaaaagagcttcaagtacagtttccacttgggcgggattagctgctccaatcgtatctccaagcgacagttcagaaatcccaaattcaaatagagcttctgaaaggcgaatgacttgttcaatggggacatctttttcgtacggacagccgaaaacagtcgagaggtaggctcttgttgtgaggtttgctttttgtgcgtcgttgtttacttgtttgagtatatgaagggattcagaagtggatttattgatgttttttctgttgtgcgtctcgctggcggacataaaaacgcaagcctcgttaatgcctccttcaagtgcattctccagtcctctttgattcgggacaagtgccgcgtacgttacccctttttctcggtcgatgccttttgctacatcgatagcatctcgaagcgccggaatccatttcgggtgaacgaaggatgtgatttcaatatacgacagccctgtccgggaaagctggttgatccaggttattttatcctctgttgcgatccaaacgggctcgttttgtaagccatcacgcgggccgacttctttgattgtcacttttttaggatatggcatggtcttcctccaaattattgagtggaattgctcagttcgagcagtacgtctccttcatttacaaagtcgccttccttttttttgacttcttttacgattccgcttctatctgcaacgatcgggatttccattttcatcgattccaaaatggctacctcctggcccttttcgatttggtcgccggctttgacgtggactttccacaggtttcctgccatttgtatgctaaccgtcatgacaactgcctcctttataggtgttgtttcaaaaagtcagtcgtgacatccccttctttaaatgcctttgttgccgcagcctgtatgagaagcggaagatttgttttgattccttctacatggtagtcgcgaagcgctgtctccagtttttcaattgcttctgttctggactggcctttgacgatcatcttagcgatcatcgggtcataaaaaggggtaacaatgctgtcttttgctaccgcacattcgtgtctgactcctttatggtcagggagtgagaacgcagtgatcgtgcctggtgacgggtagaaggtcttggggtcttccgcgtatattctcacctctatcgcatgcccgtttcgtttgatgtctttttgagagaatgtgagtgtatggcccgcagcaattcgcagctgctgctcaactaagtccaggcctgttatttcttcagtcacggggtgttcaacttgcagtctcgtattcatttcgaggaaataaaaattttgcgtttggtcaactataaattcgatggtgcctgcgttcgtatagccgattgccttcgctgcttttaccgctgtttgcccgatcttcattcttagttcatcgtctacaaatggagacggtgcttcttcaatgactttttggtggcgcctctgaacagagcaatcacgttcaaacagatgtactgtatggccgtgttgatcggccaaaagctgaacctcgatgtgacgcgcatgttcaataactttttctatatacatcgacccgtcaccgaaaaaatctgctgcgcgctttttgtttccctcgtacgctttttttaatgcttcttcattttcaacacgctgcattccgatgccccctccgcccgctgaagctttcagcatgacaggatagccgatttgacctgcggtgcggcaggctgcctctatatctccgagggattcagaaacgcccggcaccacagggacaccagcagcctccattgcttttcgcgcttcaattttgctgcccatctttgcgatgatatcaggggaaggtccgataaacacgatgttttcttgcttgcagcgttcagcgaaccggctgttttctgataacaatccatatccagggtggatcgcgtcggcatttgcttttttcgccgtctttatgattctctctatatttaaataactttcactgactctcgattctccgatcaaataagcctctgtagcggcttttgtatggggcgcgtccttgtctgcttctgaataaaccgcgaccgttttaatgccgagacggctgcatgttcggataattctcattgcaatttctccgcggttggcgatcagtacttttgtaaacatgatttcacctcattgacttgatgataggttgaacatttcaatcgttttttctcgcagtttatatttttgaattttgcctgaggccgtcatcggatagtcatccgtaaaaataacataacgcggaattttgtggcgggcgattttccctttgcaataggctttaagctcatcaggtgaaacgcttttcccgtctttcagtttaatccaggctgcagcttcttccccgaatttggcgtcaggcacaccaacgacctgtacatctaaaacagcgggatgccggtataaaaattcttcaatttcccgcggataaatgttctcgccgcctctgatgagcatatcttttaatcttccagtgatgcggcagtacccgtcttcatccatgacagcaagatctcctgtaaacagccatccgtcatgattgattgcttttctggtcgcttctttgtctttataatagcctttcatgacgtgatagccacgggtgcacagttctccctgcatgcctctttgaacttcttgacatgtcccgggttctacaattttcacctcagtatgtggcagggcacggccggttgtttcgactcttcttatgaaggaatcatttgctctcgtttgtgtaatgactggcgaggcttcggtttgtccataggcgatcgtaatgtctttcatgcccatcctttcaatcacagctttcatcacttcacttggacagggagagccggccatgattcctgttcggagcgtcgatagatcatatgcatcaaaatccggatgatgcagctcggcgataaacatggtaggcacaccatggagcgctgtgcatttctctttttctaccgttttaaggacggtaacgggatcaaattcttgcacgggtatcatggctgccccgacggatacacatgccaaaaccccaaggacgcatccaaagcagtgaaaaaacggaacagggatgcacatgcggtcttgagaggttaaagccatacattcagcgatattagcagcgttattgatgacattgaaatgggtcagcatcacgccttttggaaaccctgtcgttcctgatgtgtattgcatattaatcacattgtctttatccaggctgttcattctctcttcaagctcagcatctgtcactgttttcgccaatatctctgtatcgtcccaatgatacatgccagacaatcgtttattgccaatatagatcagcgtttttaaaaagggatagcgttcagatttcagttggccgggctttgcttcttgcagttctggaattaaactgttcacgatgtctggataagaagtgcccctgtatgaatccatgataataagcgccgcggcatccgattgctttaacaagtaatcaagctcgtgtgcttgataattggtattgacggtcacgagcacggctccgatcttcgcagttgcgaactggacggcaagccattcagagatattagaagcccatatggcgacgtggtctccttttccaatccccatccgcatgagacctttagcggtttgacggcacagactgtcaaattgagcgtacgtatagcggatatttcggtctggatacacaacagcatctcgatcgggatacgcatcagctgtttgttccagcagcctgccgattgtggaatggatgagttcagccattcattgttcctcctttcttaatgataggaaagcgtttacatttttattttaaaagctgtctggcgatcacgagacgctgaatttcagatgtgccttcaccgatttccattaattttgcgtcccgcagcatccgttccaccccatactctttcatatagcctgaacctccatggatttgaatggcttgattgcaagctcttgtcgccatttcagatgcgaatagcttggcgtacgccgcttctttggtgaacgggcggttatgatctttcagccaggcggcttttaacaccatttgccgtgccagatcaatttccatcgccatgtcagcaagcttaaattgaatcgcttgaaatgaagaaatcggctgtccaaactgctttcgttctttcgcatatgccaatgatgcgtcaagggccgcttgagcaatgccgactgcaagagcagcgatggagatgcgaccaccgtccagcgtatatagaaactgtttaaacccttttgttggatcgccgagtaagttggccgcaggcactcttacatcctcaagcaaaatttccgctgtattcgaaccgcggacgcccattttatcgtacgggctcgtaatcgtaagtcctggtgtgtcagttggcacgattaatgcggagatgatgttttttccatctttgtttttgcctgttactgcagtcacaataactgtgcgtgcgtagcttgcattagtgatccagcacttttcgccgttgattacatactcgtcaccatttgaaatcgcttttgtttgagtgcctcctgcatctgagcctgcatttggctccgtcaggccgaatgatccgagtgctgtgcctgaagccagcggcgtcaaatgcgtccgtttttgctcttctgttccgaagtagtatagagggcttgcgcctagcgagaccgctgcagcatagcttaatccagtactgccgcaggctttgccgacttcttcaaccgctaaggcatatgaaatcgtatcaccgccagatccgccgtattcttctggaaatggaatacccatcagaccgagttcacccatttttttaaatgtttgcatcgggaactcgcctgtttgatctacatgttcagcgtgaggagcaatttcttttttcgcaaaatcttttaccatttcacgcaccatttgttgttcttttgtcagctcaaaattcacatcgtttcctccttcacatctttgtaacatcctattaggcgagttctataatcattccctgacaagaaaagtctgaaaattaaaactgaatcattttttatgtgataatatcagcgggatgagcaaatacatgcagtaggcgcataccatccatatcgtaaacgcaataacttggccctttgataaagccgggaagatgaggggaagattccaaagggaaatcgtatccatcaataaaccgaccgctgatccccatatacctagcttgatcaccgcgaactgtgattgatcgagtttttgatagagaaagaacacaaggcataaaacaagagcagtgcccgctcccaagagaagaaagttcggcaaaaaggcttcttcagccggatcagtcaacacagcatctccgaacagcacaaaaaataatgtggcacctaaccagactagaaatgaaaacgtaaaacacgtcctgtacgtgtttctcttcgattttacttagtactagtttctcagattccaataatggaaaatgtccaaacaccgcctccatattcatgtgaatctcacctttgttttttaaaaaaatacagcggtttaccatcgtttcctgtctccaaaatcactaaaaaagacgacttagaaagccgtccttctcatttcttattttgttgttcgtttggaagctttgctttcgttatgaagccggtctgctgaagtgacataatacgtatatttcttgttgggatctgccgtgttatctaagaaggtttgctgctcatgtgtttttctttgcgttgccagcaatgttctctgctttttcccttcggctctgtatatcgcataataggctgtttctttcgttttttgatttgatgggtgatctttaatctgcagaagattgccgtttttgtcttcggtgactttcgtaagcttcggtttttttggggcggtattgtcaagccaaggcatttgcggaaccagtgccggcttgctgtaaaggtcggcgataagcctgtctttgatgccaagcggatttttgttgagatccttgaggctgaaatgcatgcttcctttcaccagttcaagctggcggttcaaagtgatttgccgcacatattcctcagggtcggaccaaggcggatcaaaattgttattgattttatatgctgcctggccaatatataagtgaacaggcctatttttgacttcattgctccaccaatcagccagcacgtcgtacgccgctgcgttaaagccgatactccaataaatttgcggagcaatataatcgatgtcgccttcttggatccaatgtcttgtgtctgcatatagatcgtcataatttctgacgcctgcttttgtattcgatccggtcgggtcatctgctgcgtttctccatactccaaagggactgatgccgaatttgacatacggttttgcagctttaattgtttggttgatttgtttgacaagctggttcacattgtcccgccgccagtcatcgatattagaaaaagcgtcttttccgtattgttcgtactgtgcttgatcaggaaattcctgtcctgctattttataagggtaaaaataatcatccatatgaacagcatcgatatcataatgttttacgacttcttcaatgcctttgacgataaaatctctcgcttctggaatgcctggatgataatacagctggtttccataggcggcaacccaatctggatgttttcttgccgggtgatcctcagacaatttattaagatctgtatgattcattgtaatacggtaaggattaaaccacgcgtgaaattccaaatttcgtttatgggtttcttcaatcataaatgcaagaggatcatagccggggtccttcccttggacaccggttaagtattccgaccaaggcccgtaagctgacggataaaaggcatcagccgtcggtttaatctgaacgataacggcattcattcccattttttgcacatcgtccagcagtttgatatactcctgtttttgctctttcacagataacccttttttggacggccaatcaatatttaatacggaagcaatccatacggctctcagctctctgtcagactgcgcattggccataaacggaacggaaatgacaaacgttccgatgatcaagctgacaaggaaacggataatcgacttttggcaaaccttcattctgtttcttctcccccattacatcactttcactcgctattacggtattcccgggctataaaagggtgattaacagaatgtctatctcactaaataaacgaaaaaagtcctaaagcatgttgtgggccgcttttaggactttttatcattcatcatggtttgcaaactttttaacacgtcaataagttttacgccgacaccgacagccgtttcaaggatcgcttgtgctccggcaatggctaaaataaagatcagcggtattgcaatacgaggcaaaaaaagatagccaagtccgatcaagatggcacaccaaacaccggcacaccagtagcaattgagcatgtatccaaagttagaagccggcacacttttttcatctacatgcccgttttgatcaacaatccttttctttttcataaaaggtttccggataaattctgtgattttgtcgaatacaatcaaatgtgtcagcctgtaactggctagaatcagcatgataaacgtaagaaaagatagatgatccatgacaagcctccaagaaaaaggatgatgttatcattccctagtgtcatcgatccattctttgatacaaaaagaagcggacagagaatgcctctgtccgcgaatccgctctattgtttgtgcgggattgctttatttgaagtgatcttttctaaaatgtcgaggatgatgtcagcattcttttcagcatatgttccttccagcatgtctttatgagcgccaaaacccgtgtactcactatagtttccacaggcgccttcccatttcgttaagcctgtattctcgctggtttctgggtggattccagcttcgatgaaatgaatacttgctttgatgtgcccttcattcagcaattgtgcccaatattcctgatagtttctttttttcttcatcaccttttctctgactgcttcaggcagatatgctgcagattcgtcattaccggtatcgataggcaaaggctgttcttttagataagcgtccacgataatgaagtcgctgacttctaatcctttgcgctccatagcctgtgccacttcaaaagccaggtttccgcctgcagagtagcctaataaaacgtatgggcccttaggctgtatgtccgtcatgcaattaacatattgttcaatgcgggtgtcttgttcaataaagtgaaacccgtatacggctgccttctcattcagcaataaagcaaggtctttaaaataaatgccaaatcccgatatcggcgggaagcagaaaagattttgcgcgccgtgctggttcagtttgatcacatgctgttcatttgctgctgtcagctgtttagaataaagtttttcggcaagctgagcgattgtcggatgttcgaacaagaaatcaatcggtatgtcaatgttctgctgatgttttagtgtatgtatgacttgcagtgcttttagtgaatgtccgccaatagcaaagaagtcatcatcaatactgattgtgttaacaccgaggacttgcttccaaatgttcgccaattcttcttcaaccaagtttcttggcaatatgatgttctgtcgtttggcaggcttattttctggaataggcagcgcgctgcggtctatttttccgtttccggtaagcggcatccgctccacacgcacccagtgctgcgggatcatatagtctggaagcacacgcgccaaatcggcgcgaaaatccgtatctgtttttttgtgatcaccgacgtaatgagtgtacagctgcgcctctccatctttttctctcaatgtcactgctgcttcttgaacgccttccatttctaacaggcgcgcttctatttcggcaggctcaattcgttttccgcggattttcatttgcctgtcaattctgctgatgtattctaagtttccatcaggcagccagcgcgccaaatcaccggtacggtatattctttctccaggcaagaaaggatgaggagaaaacacagcatttgtcaggtcatctttgttcaaatagcctttagcgaccccatcaccgccaacacaaagctcgccgggaacgcctattggcaaaagacgtccttttgtatctaagatgtaagcggtgctattgctgattggttttccaatcggaatcggccccgcatagtctctctttatttcaaaaaaggttgaaaaagtcgtgttttccgtaggcccgtaaatattatgaagcgcgagatctggacaggcgtgtctgacagcattcatcagagcaggagagagtgcttctcctccgacatataacgtatggaggccgcgaaacatgtcagctcgtacctgtgccagctgattaaaaagagctgtcgttaaaaatagcactgtgatgtcattttcaagcaaatacgctccaaaccgatcaggtgtcagcattgtcgatttatcaatgatatgaaggcttgcgccatttaaaagtgccccgaacatttcaaaggtgacggcgtcaaagctgatagatccagtcagaataaaccggtcatcaccggacgcagacgtgtaattgctgtttctgacaagggacacgacattgcgattcgtgatcatgacccctttcggccggcctgttgatcctgaggtatacatgatatatgcaagatcgtctggactggagatggtgttgataggaaaatggttctctcccatcaatgcctgcgcatctgcaatcatacatgttcctgagaacgcagcattttgctccagccccttttgaacaatcagcatttttgcttgcgtttcctcaagcataaagctgactcgttcaggcggaagctcctcatcaagcgggaggtatgctccccctgcttttaatacggcaagcacactgatcatgaattcgggagaatgtgcagccaatattccggctgtctcgtttttccgaaatcccttttgaattaactctctggcgagcgcattagagcgtttatcaagctctttatacgaaatagacatattgccatacacaagtgcggtatggtctggcgtcttttctgcttgttcgcgaaataaatcgataattgtatgtttctttggatactccgtttttgtattgttgaactgtgtgacaatctgctctttttctgttgcatcaagaaaagaaaaatcagcaattggcatatgagggtgctgtgcagctgtgctaagcgcttgcgtaaattgcctcttgatacaactgatccaggcagcatcgtaaacgaatgcattatagctgaacttgatgacaagctcttcgccgggagcaacgacaagattaaagttatatcctgattgctcggatacttgaacttgatcgatttgcagcggtgaatcggtctgatcagcggaatcggcgattttctgctgtaacggatagttttcaaagacgataatgtgatcaatcagttcctgttttaatgcggtgtttgcctgaatatcaaataaaggctggcaggtaaacggctcagcttccagcatttctttctggcatcgtatgaacagttcttgaaacgtttcgtcttgatgtgttttaattcgaatcggtatggtattgataaacaaccctatcatttgctccacgcccgggatttctgacggtcttcctgatacaactgcgccaaacacaacgtcgtctgtgcggttatattgctgcagcatcacaccccagacagcctgaataagggtagcgagcgtgacgccgtgttgtttggcagtctctttcagcttgtctgtcagtggtttatttaatgaaaatatcaaatcttcacggtgataaccttcttttgtttctttatcagacacacgaggcagaggtgatggagtgctgtagttttttaaataggtatcccagtaggccgctgctttttctttgtctcggtttgtcagccaggaaatataggtgctgtacggccggacagggtctaatgaaagcggttttcctgcatgaatcgattgataaatttgcataaattcctgcataacaatacctaggcaccatccgtccattaaaatgtgatggtgactccaaagacagacatgctcatcttcagctgttttgaacagagaaatccgcatcagcatgtctttttgcagatcaaagcctttttgcttgtccttctctttaaagcgttcaatatactcattctggtcgtttgttggcagatgggaaatgtcttcgctgtacaaatggaattcacgttctgtcatcacgacttgccgaggtcccgacaaatgcgggacgtgcggcaaaaacacggttctgaaaatatcatggcggtcgataatggcttgaatgctgcgctgaaaccatttatagctgaggcttcctttaatggtgaagagcgactgctcgacatacgccccctcctctttacggaggaaggaatgaaagagcattccctcctgcatgtgactcagaggataaatgttcttgattttttttatgttatccatagtgtctgcacctttcttcacggtttcattagtgaaaactgagcatatcagcaatctcttgcagggcatcctcggtcagttcttgatcatcataatcgctgatcgttttttctgtttcgcttttgttctggcagtgttcgatcagctgtaataaaaattgacggcatgtttcgctaagctgttcgatggttttgcgctgaaaacgggtagtgtcataagtcatattgacagtcattttcccttctgcagcgattgcactgatatccagcgactgttcacggttccatgttgtgctgatatcacccccggcacccagcggagagaatgagaaggcgtcctcctcaggtacttcagctgtgcggccgctttcaaattgaccaagataattaaagctgatttctggtgcacctgtgaaattgatgtcttttttgccaggcggagtcaaatatttgatgacaccgtagccgaatcctttgtcaggtacacgtctcagtgtatcttttgttgtttttagcacatgaaccatgtattcttccgaatctggcaagtctgcgttcaatttaaccaataacggataaatggcggtaaaccatccaaccgtccggctcacatctattccttctaatacatcctctcgcccgtggccctctaatgatagtttgaaggcggattgattggtccaatggcgcagcgcaagaatgacagaagcgagcagcatgtcctgcgtatcagtgttatatgcgctgttggcgtcttttaagagtgctgctgtctctttctcgtttaaggtaaacgaaatcgtggaccgttgtccctcgtgtgctctagttccatcaatgtgatcaaaaggcaatgcctctgtttgatactcttcggcttcgcgccaatacttgagctgtttcatgagctgctggctttcagcgtagtcagagagctttttcgtatacgctttaaatgagcttgttttaggcggcagtttgataaccttcccgtctgcagcttggcgataccctaaagccaaatcttcaagcagaacccgccatgaaatgccgtcaacgacgaggtgatgagcagataaaaataagaaatcaccgtcaattgtgtggaaaagaccggcttgcagcagcggaccattcttcaaatccattttctgctgaatatcaagtacatgacgtttgataataggctcatacgctctatttccatcagtgcataaatcaatcatctcaaggccgtacaacgcgtcgtccgaatgactgagcggccgattatattgatcccactttccttgttcattctgtgtaaacaccattcgcagcgcatcatgatgacacgttattgcttttaacgttttgcgcagtgcgtcttcttgtacaaaggtacttcgatgcagcattacggactgattaaaatggtgtttttcttttatatcttgagaaagaaaccatttttgaacaggcgaccattgtacgtctccctcaaccgcagcttggctggaacttgtatctgaatcacggatataagctgccaattcttgaatggtcggatggctaaacaaatctttcactgccatttgcttgcctatccggtgaagccgcgcagatacctgtaacgctttgattgaatctccgccaagttcaaagaacgaatcagctgttccgatcttttctgcccccagtacttcttgccatatatctgccagtatttgttccattttgctggctggcgggaggaatggacgttcaccttcgtggttatatacaggttttggaagtgctccgcgatccagcttgccgtttggtgacaatggaagtgagtccagtttttcaataaacgcagggtgcataaacaccggcagcttgttttgtaattctgagcgtacagcatttgtgctcaactctggttttgtcaccacataagcacttaattcggtttgtcctgacgctgtttcatgagcaactactgcggcgtcttttacaccatttatacaccggatgaccgattcaatttctttcgtttctacacggtatcctctgattttgacttgatcatcgattcttccgagatattcgagtgttccgtcggccatccatctggcggcgtctcctgttcggtacattcgtgtttcgggtttaaatggattctgcgtgaatgctctctctgtcagttctggaagattaacgtaccctcttgcaagccctgttcctgctatacaaagctctcccgcaacaccgattggctgaagctgatgattgctatttaaaatcagcacttgagtcccgtcaatcggctggccgatgcttacgtatgcctgcttttccatatgtctcatgacggtagtcgccacgctgttttctgtcggtccatattcgttggcgagttcggtatgcggacatatagctaagctgcggtcgatcaattcgcggtcagccgcttctcccgccagtgtgacgactctaagtgtctttacatcttccggctgcactatgtccaaaagcgctcgatataaaacaggcacaataatcatatgtgtaatccgttgacgagacagctgatgcttaatgaccagaatatccttcgcttcctcttcatgaagcaaaacggcttttgcacctgacaaaagcggtgtaaacatactcgttataaagccgtcaaatgagaaagaaaagagctgcagaatggtatctgtctcgttgaatgcataagcgtttcgccgccactgaagagtgttggcaatacctttatgctcgaccattaccccttttggacggcccgtcgttccagaggtataaatgatataagccaaatgatgagcagacgatacttgcggcagcggtgatttgtcgtatgcctctacactttctatcgctaagaactctccttcaaagtcagcaagtgcttcccgatccgcttcatttattgtcatcagcagtttcgttccgctgtcgctaaggatatagcgtttccgttctgtcgggtattcaggatcgatgggaacgtaacagcctccggctttccacacaccaagtatggatgctatcatactgaacgaacgatgcatcatgatgcctactggtgtgtccggcttaacacctcggctgcgcaatgcacgtgcgattccattggaccactcgtcaagctcctgataagtgagtgttttgtctccgctgacaagtgcagaagcttttggtgttcgtgcagcttgctgctcaaacaattgactgattgtttgaactccgtattgattcgcttgcccggtgttaaactcattaagcagctggtgccgctcttcttgggtcaggatgtcgatatggttgagtgtcacctccgggtttttgccgatgatgctaagtacatttgttaaatgcgatacccagcgttcaatggtggttttctcgaacaatgcggttgaatattcaaaaaggaaatgaatgtttccgtcgccctcagatgcctgtagtgtcaaatcgaatttagaaacgagatgagaaacttgtgccggcttcattttcaaatcatgaagatacaatggctcgtaatcattattttgaacaactaacatcgcatcaaacactgggttccggctcatatctcgtgtcaatccaagcttatcgacaagctcttcgaacgggtaatcttggtgctcaaaggcttccaatgctgtctcacgcacttcctgcaaatactgtacgaatggcttcccgccctccgggcgtgtccgaagcgccagcgtgttcacaaacatgccgagtatcggctcaagatccttgtgcggccggccggcgattggcgagccgacgatgatatcctcctgtccgcttaagcgtgacaagaacgcggtgtaagccgcaaggagcaccatgtacagtgtgcttccgttttctcgtgccagcttgtgaaggcctgatgcaacctcttgatccagcgtaaatgagaccttgtcaccagcgaagcttcgcaccggcgggcgggcatgatcagcggggagatccagcacaggcagctcgccctcgagctgcttcagccagtacgcctcttgcgttttgtacgcgtctcctgttttgaatccttcttgccatacggcataatctttatattgaatgcgcagcgccggaagcttccgattattgtacagctcgccgaattcttgaatcagaatgttgacggaaacaccgtctgaaatgatgtgatgcatatcaaccagcaacaggtgccgctcatctgatacctttacgatttgggcacggaacagcggcgcttggctgagatcaaacggtttgataaatgcggctgcggcctcctgttcggttcgttcgccgagaactgtagtctgtaacgtaaacggcacctcgtcatggatgcgctgcaccggatcgcctccttcgtcctgttcgaaggcggttcgaagcgactcgtggcgcttgatcagctcttggaaagctctgtccatcctttcagggttgagcttcccttcgagctctaacacagccggcatattgtagcctgtccctccgtcttccagctgctgaaggacataaatccgcttttgggcagaggaaaccggataggtttcctgtttttcagcgggcttaatcgcttcatatggactgtccgttccttcacggataacggtagccagtccttctaccgtcggatgggcaaacacatcttttagcggcacctgtacatcgaattctttggtgatccgtgagacaagcgccgttgcttttaaggaatgtcccccgcggtcaaaaaagttgtcgtgaatcccgacagggccatttttcagcacgtcctcccacagctgagaaagcttcatctcagtcacgtttctcggcgctgtgtaggtctccgcatctgccgctccgccaggagctggcagggcgtttcggtcgagctttccgcttggcgtaaccggccactgtttcatttctatcatataggctgggaccatgtagcccggcaacagtctctcaagctgtgcacgcacttcgtttctttggagcccttctatataagcgcataattccggctccccgctgtctgtccgtacggtaacagccgcctctcttacaccttctatatttcttagtgccgcttcaatttctcccggctcaatccggtagccgcggatttttacctgatcatccgtgcgcccgaggaattcaacattcccgtcagggagccagcgcgccacatccccggttttgtacatgcgttcccccgggtaaaacgggtcttcaagaaaacgctcctccgttaatgccggccgattcaaataacctctggcaacacccgctccggcaatgtatagttcaccgatacatccaacaggcagcatccgctgattctgattcaggatatacaatctgacatgatgaacaggttttccaattggaatccgttcaagtttttcttgcggcggacaatcaaagaatgcagcttctacggttgcttccgttggcccataggaattggttattgaaacatttggaagcaacacgtgaaatcgggagacaagatgggtctccagctgttctcccccagaaaacactcgcttgagtctgtttgtcttaatcggtacagagcgatattttatatgttctaaaaatgcatggagcattgaaggcacaaaatgcatagctgtgatcttttgttcttctatggccttcgcgatcacttcaggttctttttcgcctccctgaggaagcagataaacagaagctccggcataaggccagcaaaacagctcccatattgaagcatcgaatgaatatgatgttttgtgcataatcatatctgaatgctttagctgatagcgggactgtagggaattcaaaaaattcaccgctgatcgatgttcaatttcaacacccttaggcatcccggtagaaccggatgtatagatgacataggctaaagattgcgggagaacatccacattcggattggacaaacgatgtgccagtccgctatttgtctgattgagatagacaatctctcctgcaaatgccggaacatgaagaccggaagactgaagcaggagaatgtttgtaccgctgtccttcagcagaaagctgattcgttcttccggataatccgggtcaatgggcagataagcgccgccagctttaagaatgccataaatgccgatcagcatttcaggcgaacgccggcctataatggcaacagtcgtttcagattttactcctcgtccgatcagctcccaggcgatacggttagcctgttcgttcaattctttataggtcatcactccatcttcgaagataacggccgcctgatcaggcgtttttgctgcctgctgttcgagtgcatagtgtagcgtttgattcattgaatagcccgtctcctcaaacagatggcatgattcaatgaaatctctctcttcttcttttgttaagattggaatatcgtccaattctgtttcaggactggcagctgtatgttccacaagcgtggtgaaaaggctggcccacctttggatggtttctttctcaaacaaagctgtactgtattcaaactgacagaaaagctcggaatcatgctctgtaacgtatagggaaatatcaaattttgatattgggtgctccaagtcgttccactgaagctgtatatcattcatttttagcttttgctgttccatattctgaaggactagcgttgtgtcaaacaaaggattccggctcatttcccgctgcacaccgagtttgtccacaagctcttcaaacgggtaatcctgatgctcatacgcttctaatgccgtctgtctgacttctttcagaaattcctcaaatgtcttattacccgctgggcgtgtgcggagagccagtgtattgacgaacatcccaagaacagcttcaaggtcggcatggggccgtccggcgattggtgaaccaatcacgatatcatcctgaccgcttaaccgagacaaaaaggctgaatacaaagcgagaagcgtcatataaagcgtgcttctgtttttatgggcgagccgctttatgcgggccgtgatctctttgtccaattgaaaggttacttttccgcctatgaattgccgttctgccggacgtcgtttatctgttggaagctccagtataggaagatctccgctaaactgctgctgccagtaagtctcctgcttttggtacgagtctccctttttaaatttctgctgccatacggcgtaatctttatattggatccgcaatggcttaagctgccggtttgcataaagatcggtaaattctcggattaggagctgaacggatacgccatctgaaatgatatggtgcatatccaccagcaatacatgcttctcgtttgacacttctataaggcctgctctaaataatggcgcctggctgagatcaaagggacggacaaatccctcgatagtggtctctttacttaacgtaaacggcacttcggtgtggatacgctgaaccggctcgtcatcagctccaggtacaaaggaagttcgaagcggctcatgccgactgatcagttctttacatacagcagacagtttggcgacatccagtgcaccttccagttctaagaccgcaggcatgttataggcgacaccctcatcaagctgttgaagcacatagattcgtttttgggccgaagatacaggatatgtatcccttttttctgctggttcaattgctgcatacagattttgttctgcctctcgaataattaaagctaatccttcaacagtcggatgagcaaagatgtccttaagtgaaacttgcacatggaattcctttgcgatccgtgacataagcactgttgcttttaacgagtgaccgccattgtcaaaaaagttgtcttggatgcctatatgcccattctttagcacatcttcaaatagttgcgaaagctttgcctctaacagatttcgaggggcagtatatgggtttccgctgattgaagcatctggctccggaagtgctgcgcgatctacttttccgtttggggtaagaggtatgctgtcaacccatatccatttcgccggaatcatgtattctgggagctcactagccatataactgcgtaaatctattgcattcagcttttgtacactgcaatagtaagcgcataattcatgttcaccgttttgatcttgccagatgagaatggcagcctcactaatgtccggatgattcattagcgtgacttcgatttcttgcggctcaattcgataacctctgattttcacttgattgtctgcccgtccgatatattcgatgttgccgtcttcaagccgtctggccaaatcacctgtccggtacatgatcacatcaggcttgaatggatcggatgaaaatttgtcgcttgtcagtttatcgtgattgacatatcctctggcaacacttgcgccggaaatatagagttcgcctggtacgccgcatggctgaagctgtttttgatgattcaaaatatatagatcagtacagcctatcggtttaccgattggcggaagctcaggaatagggtctccaggatgaatggtatacgtagataccacatgagtttctgaaggtccgtaatgattgtgcaggtgtatgccgcgttcacacaacacatcttggaaaaggtctgaaatcattaattgttccccggctgcgatcaggtgtttgacgccatcaggaaacgagttcgcaagttctcgctcgctgaaaatcattttgataaaagcagttgggagaaacacaatattcgtctgatgcttgtttataaatgcaaacagctgaggcacatctctttttatggcttctggcacgatgtggagtgtgccgcctttcagaagcgcagaaaatatttcttgatagcagacgtcgaaggaaggtgtcgcaaattgcagaacatctgcttcaaagtcaatgccggagtgagtatattcgaacttcagcaagttagccatgtttcgatgctcaaattgaacaccctttggtttacctgttgtgcctgatgtataaatcatatacagcagatcgtcagcattgttgactgactttatgttactgccgtctactttgctttcgatatcttctggatgagtgataatgtaattgtcttctaacgatgaggaaagatgcgcttgtgaaacaacatgcgaacagccgcaatcatgcagaatataacggattctgtcagccgggtaatgcggatcaaccggaacaatggcgccgcctgctttcaagataccaagaacacctgtgataaacgccgctgagcgttccatcataatcgcaacgggttcctgtctcacaacgcctttcattcgtaaatgccgtgccaatctgttagccgctttattcagttctctgtatgttaatgagcaggcttgatcaattacagcatgagcatctggtgtcttttccgcttgcttttcaaacatggcatggatggtttcgtaaactggtgttcgatctgtgatttctccaatcagctgccgcttttcagtatctgtcgtgatatcgatttcttcaggtggaagattcggattatttaagatttgtgatacagcattcagaagatgctctttgacagagagcacaaaagaccgatcgtgctgctccgcatcatagttcattttgatatgaatttcttcccctggcgccaccataagataaaagctgtagttggtttcatctgcgacagtgaaattatgaatctgaaaaagatcagaagcatgttcctgtttgttcagcatttgaatctcttgctgcaccggatagttttcaaatacgagaatatgatcaatcagcccttgtttaacagctgagcgggattgaatctcatataaagggtggtagctgtacgcttcagcggcaagacggtctttttgcatatcttttataagttgaagaaatggcgtttttgccccctgcacccgaaccggcatcgtattaatgaaaagacctaccatatgttcaatgccttcgatttctgcgggtcttcctgaaatgacagaaccgaatacggcgtcatcgttattattatatttttgtagcagaatgccccaaatggtatgaaaaatcgtactgagtgtcacttcttctcttgcagcaagctctgaaagtctgctgctttcttccttagagaatgaaaatgtaacgtgttcctgcctgctttttccctttgtttttttctgcttcgggagcacggtttgctgttcgtggccggaaagataatggtcccaataagaaaccgcctgctctttgtcttgctccatcagccatttgatatactttccgtatggctggaccggctccaatgttataggggatgcatttacataagatgcgtaaatatgcagaaactcctttagcacaatgctgaggcaccaaccgtccatcatgatatgatgaaaggtccaaatgcaagagtactggctctctcctgtttgaataagagcgatgcgcatgagcacatccttttgcaaatgaaacccccggtcccggtccttttctttccattgctcgataaactgtgattgctccgcctcgtttaaatgagtaatgtcttcttccagcacgatgacatttcgttctctcagaacaacctgctggggggaggaaacattttggctgataaaaatcgttctgaaaatatcatgtctttctacaagagcgttgatgctgttttgaaaaaactgcgggttgacttttccttctattgtaaaagaagcttgctcaacatacgcctgtgaatctttttgcaggagggaatggaaaagcatcccttcctgcatgtaagacagcggataaatatcctgaattgaattcgcttttgtcatgttcatgtctccctgtcacgattttctacaattcttccaccaagctggatatgctgtccaagtcctctgccgttaatgattgactgctgaaatcgctcagtgtcttttctgctttctgttgaccggcgcagtgtttcataatgtccagcaaaaagtgttcaatcctgttaataagctgctccattgtgtttctgtgaaagcgggctggcggataactaagattgaaatggagctttttgtctgctgccattgcactcatctcgatgatttgctcacgcttccatgtatgagtgatatcctttccgctaccaaggcttgatgggcggaaggtgtcctgtctttcgatgtcgttgaactggcccaaatagttaaagctgatttcaggtgtttttgaaaacgtaatgcttttattttcagggtgtgtaaggtatttcagcataccgtaacctacccctttgtttggtatccggcccagtgtatctttaacggtttttactgaggttccgagctcatccctatgattttcaaagcttatgagggccgggtacatggatgtaaaccagcctaccgtcctgctgatatctaactctggcagaatgtgttctctcccgtgtccttccatagcgatacggagcttgcttcctcctgtccattcacaaatcgccaaggatgctgcggttaacagaatatcttgtgtatctgtgccataggcgtgattgacgttttgcagcaagacggcggtgtctgcttcagtcagtgaaaagcttaatgagtcccttttgctggtgtccatgttcagatgctgcggtatttcgtatggcagttctgcggcttgctgttcttctatacttcgccaatacgcctcttcgcgaatcagcttactgctttgggcatattcctgtatgcgtcttgcgtattcctggtaggaatccgttttaggcggaagctggatcgtctggcctgcagcagcttgttgatatccggctgacaaatcctcaagcaaaatccgccatgagacaccatcaacgacaaggtgatggatcgcaaggaacaagtaatctccgatcagtgttttaaacaaagcggcgtgcaacaatggtccttcctgcaaattgatgctttgctgaagatctgcaacttcttgtttgatttgcgtctcccagccgctttctgactgtgaaagatcagaggttcttaagctgtatagctgtgactcatgaatgccttggttgatttgaatccatcgcctatcatcgttgcgataaaccatccgaagcgcatcatgatgctccgccagttttttcaaggctggtctaagggcgttttcagacaaacgtccagaatggaatagcatgacagactgattgaaatggtgtctttcttcaatatcttgtgaaaaaaaccattgctgaacaggcgtccaaggaacgtctccctgaatgggtccttgctctatgattctctctgacttacggataaatggtgataagtcctttatctttggatgacggaataaatcacttacctgcaagcttagcccatagcgcccaaggcgtgcagaaacttgaagcgctttgattgaatctccgcccaattcaaaaaacgaatcctctattccgatcctctggatgccgagaacctcctgccagatcaacacaagttggtcttcaaggtcatttcgaggcggagcgtacgtttgtttagatgtgaaatttggttcaggaagtgcttttcggttcaatttgccgtttgatgtgagcggaagagtctccatttcaataatgtacgccgggatcatatagtttggcagcgaacgcgcgagaagtgaacgcacttgttcagcattcgtgcctgcttttacgctgatatagccaaacagctctttgctcccggtctgggctgtacgtgctaacactgcggcttctttgaccccgtctatttgacgaagtgctgattcgatctcacccagctccacacgatagcctctgacttttacttgatcatcaatacggccaacgtactcaattgtgccgtcaggaagccagcgcgccagatcacctgtgcgatacagtcgatcgccaggtgcaaatggatgtgggacaaatttctctttcgttaaatcaggacggcccaaatatcctctggcgacgccatctccgccgacacaaagttcaccgacagctccgaccggctgcagcactccccattgatttaagatataagcggtggaattaccaaccggccgcccgatcggaatggaaagttcatatgttttttgaatgtgaaggcatgtcgaaaaagttgtattttcggtagggccatatccattccatatagatacttcagggcagacatttctgattcgattgacgtggctcggcgacaaagcttctccgccaataatcaaatgtttcagctgtgaaaatgtttgttcattttgttctgtcaaatgattgaatagagaagatgtcagccaaatcgttgtgattccttgatgttctatgtacctcttaagctgatgggaatcgagaaatgtttgttgatcggacagatgcaaagcggcaccatttagcagcggtccgaaaatttcaaatgacccaacgtcgaaacctattgatgatgtcatcagaaggcggtcttcaggtgtaaatgtaatataattgctgtttttaacaagacgaattacacttcgctgctcaatcatgacaccctttggtttaccggttgatccagaggtataaatgatatatgcgagtgaatgtggccctgctgaagaatcaacgttcttcgtttttccttgcttttgaatatcttcgattatgatttgttcacattcaatgtctaatagctgtttttctgttttttcagattgaaggagtaatgccgccccgctgtctgacagcatataagctattcgttcaacaggcagatcagaagcaataggcagataggctcccccggctttcagaatgcctagcattcctgcaatgagttctggtgttctgcctgtcaacaaggctacaacactatcaggccctacgcccttaatctgtagaactgaggcaatttgatttgcccagctgttcaggtcctcgtaagtaaatacttgggtgtcgctgacaattgctacagcattaggcgtttgttcagcctgcatttcaaagagtctgctgatggtttcatttcttggataatctatttttgtgcgattgagctcgtggataaggtaatgggtctcatcctcattcaggatatttattgttccgagagcggctttgttgtctttgaagatggagagtaacatattgatgaagtattgaagccacttttctatcgtttttttcttatataagtcagtactaaactccatttggaacgtcagcaaaccgtggggctgttcctgggcatatagggttaaatcaaatttggacgtttgatgcccattgtttgctgcaggtttgagacaaagttcatccagctccaacgattcctgatccatgttttgaagaacaaacattacgtcaaacagcggatttctgctcatatcccgtgtcaattcaagcttatcaacaagctcttcgaacgggtaatcttggtgctcaaaggcttccaatgctgtctcacgcacttcctgcaaatactgtacgaatggcttcccgccctccgggcgtgtccgaagcgccagcgtgttcacaaacattccgagtatcggctcaagatccttgtgcggccggccggcaattggcgagccgacgatgatatcttcctgtccgcttaagcgtgacaagaacgcggtgtaagccgcaaggagcaccatgtacagtgtgcttccgttttctcgtgccagcttgtgaaggcctgatgcaacctcttgatccagcgtaaatgagaccttgtcacccgcgaagcttcgcaccggcgggcgggcatgatcagccggaagatccagcacaggcagctcgccctcgagctgcttcagccagtacgcctcttgcgttttgtacgcgtctcctgttttgaatccttcttgccatacggcataatctttatattgaatgcgcagtgccggaagattccgattattgtacagctcgccgaattcccgaatcagaatgttgacggaaacaccgtctgaaatgatgtgatgcatatcaaccagcaacaggtgccgctcatctgatatctttacgatttgggcacggaacagcggcgcttggctgagatcaaacggtttgataaatgcggctgcggcctcctgttcggttcgttcgccgagaactgtagtctgtaacgtaaacggcacctcgtcatggatgcgctgcaccggatcgcctcctgcgtcctgttcgaaggaggtacgaagcgactcgtggcgcttgatcagctctttgaaagctctgtccatcctttcaggggtgagcttcccttcgagctctaacacagccggcatattgtagcctgtccctctgtcctccagctgctgaaggacataaatccgcttttgggcagaggaaaccggataggtttcctgtttttcagcgggcttaatcgcttcatatggactgtccgttccttcacggataacggtagccagtccttctactgtcggatgggcaaacacatcttttagcggcacctgtacatcgaattctttggcgatccgtgagacaagcgccgttgcttttaaggaatggcccccgcggtcaaaaaagttgtcgtgaatcccgacagggccatttttcagcacgtcctcccacagctgagaaagcttcatctcagtcacgtttctcggcgctgtgtaggtctccgcatctgccgctccgtcaggagctggcagggcgtttcggtcgagctttccgcttggcgtaacaggccactgttccatttctatcatataggctgggaccatgtagcccggcaacaggctctcaagctgcgctcggacttcgtttctttggagcccttctacataagcgcataattccggctcgccgctgtctgtccgtacggtaacggccgcctcccttacgccttctatgcttcttagtgccgcttcaatctctcccggctcaatccggtagccgcggattttcacctgatcatccgtgcgcccgaggaattcaacattcccgtcagggagccagcgcgccacgtctcctgttttgtacatgcgttcccccgggtaaaacgggtcctcaagaaaacgctcctccgttaatgccggccgattcaaataacctctggcaacacccgctccggcaatgtatagttcgccggcgacaccggaaggctgtacggctaaatgcggatctaaaacatacaaacgcgcaccaggtacgggcttcccaatcggaatccgcaaacggtctctgtcccgttctggatccaatacgtaaaatgccgcgtctaccgttgcttctgtcggcccgtagccatggattaatgatacctgcggcaatacagaagcaaaacgggctgccgtacgcggcgcaagcggttcacctccggcgaatacacgctttaggtttgtcccgtcaccaagcgctaacatttctgcttgatccagaaagctattcagcatagccggaataaaatgagccgttgtcactttttcctgatgaatggcttttacgatcaatgcggagtctttttcccagccgggcggaagcagatacgccgaagcaccggaaagagcccaccaaaacagctgccacacagacgcatcaaaggaaaaagaggttttcaccatgacaatgtcatcttctgaaagcggaaactggtgctgcatgccggtcagaaaggaaacagcctggcggtgctcaacggccactcctttcggctgcccggtagaccccgatgtatagatgacataggcgagagaaccgccgtcagcaggagtaaacagatggttttctgctttttcgctcgcaagagatgtcatatccacttcaagcgtttcgccagaaaagttcggtgcggagcatcccggctgtgtcagcaagagcgatgccccgctgtctttcagcatgtagctcagccgctcctccggatacgcaggatcaagcggcaaatacgccccgccggccttcagtacagcaaggacagcgatcagcatgtcaggtgagcgttcagacaggatcccgacgatactttcgtttgtgacgccgcgtgccgcaaggtgagcagccagccggctggcgtacatatcaagctcagcgtatgtcagcgaaccgcctgaaaagcgaatcgctggccgctccggtgtgactgccgcctgtcgttcaaacagcccatgcaaggttggggcttcaggtgaaacagatactgtcctgttattttgagaaacgattttccgtgttttgtcctcatctagcaatgtcatctttgacacaggaagagatggatcagagatgacgtcagagatcatgtgctgtaaataatcttttatttcggacatcatatttggttgataagtgcctgtatgaaaatgaatccgaacgtacaaagtacgccctgggatcactttgacactgcatctataattagttacctcttccatctcaaaatctttcacggagaaatcaaatgatccagcttgattcagctcttcaatctcttgttgagtaggtgtattttcaaagacgataatatgatcaatcagctcttgtttaagagcgctctgcgcctgaatgtcatataaagggaagtaactatacgcttctgcttcagtcatgtccttttgcattccgctgactaggtcagaaaaagacagaaaatcactttggactcgaataggaatggtattgataaaaagtccgaccatgttttccacatcttttagctcagaaggtctgcctgatataactgatccgaatacagcatcgtcgcgacgattgaacttttggagcatgattccccataaagcttggaaaacagtgttaagtgtcgcaccacatgctgcagcgattttctgtaattcggaggtttctttttcaggaatggtaaacgtgatctgctgtaatgtcccatccgacatttgatctgttcttttaggcagaggtgaagctttttcgaaatgctgaagcctctttttccaatactcagctgcttcttcccggtcttgctgcatcagccatttaatatacgtcccgtacggctgtacgggaggcaaatcaggaaactgcccttttccaagcgcttgataaatatggagaaagtctttaatgacgatgcctaaacaccagccatccattaaaatatgatggtggctccagatacagacataatgatcaggcgcccattttaaaatagatattctcatcagtacatccgtttggagatcaaagccttttgatttatcctgttctttgaatgcctctgtacaatgttctttatctttttcattgagatgagaaatatcttcaacatgaatatggcaatgacgttgcttgagcacgacttgacgaggtttggctacatttttatagatgaatgctgttcgaaagatatcgtacctgtcaaaaacagcatccatacttttctggaaacgctccaagtcgagctgtccattgatcgtaaaagaagcctgttcaaaataagctctcgactgttcatcatacaatgagtgaaaaagcatcccttcctgcataaatgacaaagggtatatatcctgtatttcaggttgctgcggcatcagtgaatctcctctcctatagtttgttgacggctcccatgatctcactcaattcatcaagcgttaagtcttcatcagtgaaatcagatgcgctccactctcggttttctttgccggtacaatgctcaatgatgttttccagagtctgtttaaaatgcctggaaaatgtttggattgttttttcctcaaattgaaccctgttatagatgatgtgcatgttcaggcaccccgaagaaacggcgccgctgatatccagtgcataaggacgctcccagttcgggctgatctcatttcctggcttgatgtcagacacctcaaaggcatttgattgaatatcctgatcaaactggcctaaataattaaagctgatttctgggctgtttttctgagagccccatcttttgctgatatatttcagcacgccgtagcccgcgcctttatgcggtatacggtgcagcatatcttttgtctgtttaataaggtggcccagccgctcttctttgtccttatgatcggaatctctcatatcaagccacacaggataaatggaggtgaaccagccaacagttctgctaatatcgatgtcctcaagatatgattcccttccatggccctccatgctgattttaaattggttatttcccgtccatttctgcaaagcaaaacctaaagctgtcagaaggatatcattcatctccgtgctgtaagctttatgtgcagccgttaatagtaattctgtgtgatggcgagatagctcaaaatcaatcacttctgtatctatgaatgtgttagatgctgcgtcattgtcttttggaataggctggatgtgacggttctcgcactcatcccagtacgctgcttctcgctgcacctggcggcttttagagtagtcagctattctttgtgaatacgttaaatatgaatctgtttttttcggcaatttaatagattctcctgagactgcctgtttgtaagcagctgaaaaatcctcgaacaaaatgcgccaggaaaccgcatcaacaactaagtgatgaatcgtcagaaataaatggtcaccattctcggttctaaacaatccagcatgaagcaaggggccggtttccaaacgaatatgttcttgcatccggctggctgcttcctcaatcgtgtaccgtgcttctgttaggctatcctttacatcaaacagttcaagtgcatatagctcctcatctgaaagatctatccctctgtttatctgcacctgcctgccatcttcatgccggcatacgattctcagtgcatcatgatgagtcacaaggctttttagtacttttctaagcgcagcctcatcaaatcgttcagcccggtagatcataacggactggttaaaatgatggctttccagagattgcgagaaaaaccactgctggataggtgtccaagtaatctcgccttcgaccgggccttggtcaatggcgcgtacgtcttttcgaacccgggcggacagttcaccaagagtctgatgttcaaacatctcacgtactgtcgtttcaaatccgcgctgcttcagtctggcacaaacctgcagcgctttaatagagtctccgccaagctcaaagaaattggcgcttacacccagctcatctacattaagaagctcctcccaaatttcagccatgaccgtttcaatctcatttctaggactgatatcatcagatgtataagcgtgtttttcaggctcaggcagggctttctgatcgagctttccattaacagtcaccgggatgctgtcaatttgtatcatacgggcaggcagcataaagtcaggcaaggcgttttttaggtaagcccggatgtctgatatattcgcagcctgttgatcttttatcaccatgtaagcatatatagctgtttgcccttgctcgtctgctctggtaatgacagccgcctctttaatcattggatactgaagaagtgccgcttggatttcgcctaactcaatacggtgccctctgactttcacctgctcatcaatgcggcctaagtattccagctcgccatttgacaggcgcttagcaagatctcctgttcggtataatctgtctcccggaagataaggattggatacaaaacggtcagcggtcagctcatctctgttgagatatccccgtgccacaccttcgccgcctatatacagctcccctggaactccgatcggctgaagattcatatgagcatccatcacataagcctgcagagttgaaagcggccgtccgatattgcttttattttttacaatgtctgctgcggacaattttttgaatgttacatggaccgttgtttctgtaataccgtacatattaatcaaatcagtatgaggatattttttattccagctttgaagcatgccgggctgtaaggcttcgccgccaaaaatcacgtagcggatgtttaaatgatctgtatgattttgatcttcaagcatcaagctgtaaaaagcagtcggggtctgattgagtacagtgacgcgctctttttttaacaataaacggaatgcatgggggtcacgggctgtttctttagagaccacgactaatgtacctccgttcaataacgcaccgaacatctcccatacagagaaatcaaagcaataagaatgaaataacgtccagatgtcttcatggttaaattcaaaaggcaggttttgatgcttcaagagactgatcacattgcggtgctcgacaatgactccctttggctggccagtcgttccagatgtgtatatcacgtatgcgggctgatctgttactatttcttgaatgtttgcatcagccggaattgagttgttttcacattcatcgatatacaaaatatgcccggtgtagtctgcaggtttgttttgaccgcgctctgtcagcagcagttttgctccgctgtcattaagcataaagctaatacgctccttgggatattcaggatcaatcggcaaataggccccgccagcttttaaaatcgataaaacgccaatgatcatatcaggtgaccgatcgagcatcagaccgacgatatcgccagttcttaccccttgtttgatcagcatagcagctgcccgctcggctttttcattcaggtctcgatacgtaagctgagaatggccgcacaccactgcgatatgctccggatatttagcggcttgcttttcaaataagcttactatgttttcatttctcggataagccgcatactgtcccattttttcaaggagcaacctacgctctgcagcaggaagcaattgcatgtccgaaattctcatctcggtatccgccgttacccctttcaccaattcaataaaataggatgcccactgcgtaatggtttcttcttcaaaaagagcagtgctgtattcaaaacggcagcgtatcccactaggatgctcctcagcgtgtaatgttaaatcgaatttagatatatcatgtttaggagtgacagacgaaatcgacagaccaggcacttcgaaccggaaatcttcactgctttgaagcacaagcatcgcatcgaacagcgggttgcgatttacctctcgatttgtatcgagcttatctgccagctcctcaaaaggataatcctgatgctcgtaagcggtcagagccaggtggcgaatgtcctgcaaataggagctgaacgttttgtggccctcgggcttgctgcgcatcgccaatgtattgacgaacatcccaatgacgcgctccagatcagcgtgcggtcttccggcagcaggcgaaccgacaacaatatcctcttgtccgcttagcttagataacaaaatagaatagacagccagaagaatcatatataatgttgttcccgtttcagccattaaacggtgcagctcatcagccatgtctttatcaatgttgacttcaattgttccaccgctgaaatcagggagacgcggccttgttttatcaagcggtaattctagtgtaggaagactcccgccaagctgaccgagccagtaggcctcctgttttttgtatagctcttttgggtgcttctcttgctgccaaacagcaaaatccttataatgcaggtttaaagctggcaactcttttccgcgatataagtcagtaaattcttggacaagagtgctcatcgagacaccgtcggcaataatatggtgcatatcgagcagcaaaaagccgcggtgattgccgattgtaatgacacatgctctaaaaagcggaccggatgatagatcaaacggtttgataaaggtctcgattgcagactcaagcatttgttctgattccatttcaagctcttttagatcaaaagctatctctggataaatgatctgcacaggctcgtctctgtcaagcacaaaaacagtccgtaatgcttcatgccgattcacaagttctgtgagaacgcttctcaaccgctggcggttcagatttccgcgtaattcaagtacagctggcatgttataacctgtgctggcatctgccagctgatgaagagcatataatcgtttttgcgagaaagacagcggatagacatctctttgatccgcaggttcaatctgtgtaaaagcgtgttcttttaagctcatcaatttgaccgccatgctttcaaccgtcggatatgaaaacacctcactgagcggcagctcgacattaagctttttatgtattcttgataccagtgcggccgcttttaaggactgtccgcctaactgaaagaaatcatcacgaatgccgatgtgctgtttattcagcacatcttcccaaatatgtgcgagatcagcttcgattaaggttcggggcgccatatatgtgacactcgtattgttttctggttcaggaagcgcaaacctgtcaagcttgccgctggatgttaatggcatccggctgatgttgataatacttgctgggatcatataggacggcaatgtcccggcaagatgctgatacaaatctgggaggctgtttcccttttccggaacgatataagcaacgagctccttttcctcagcagaaacatcacgggccagtaccgctgcttcttttacccccggtgcttgtcgaagaactgtttcaatctctctcagttcaatacgataacccctaattttcacttgatcatcaaaacgtccaatatattcaatcgttccatcaggcaaaaagcggcctgcatcacctgttcggtataaacgctccccttcaaggaatggatgatcggagaatgctttctgtgtcagctcttgctgtttgtagtatcctctcgcaagacccgcgccggaaatacacagttcacccgccgcgccgatcggctgcatttgatttccgtgcaaaacaaatacttttgtgtttctgatcgggtgtccgattgtgatcctctctttttcattcagatgccgcaatattgttgttgccacactgttttctgtgggcccgtattcatttgccagttctgcagaaggacaaatcatttgactcaactcaagcagatcaggcgtgaccgcttcacccgcaaatgtcacaatacgaagactttttgcatcgtcagcagtcatcacttccaataacaccctgtacagggaaggaacaatgatcatgtggctgaccttataacgggctatttttcgcttaagggccagcacatccttcgcttcgtcatctgttgtcagcagtacgcacgcaccggataaaagcggggtaaataagctcgttacacagccgtcaaacacgtacgaaaacaaatggagggatatatcctgttcggtcatgtcatactcttcccgtctccattgcaatgtattggcaataccgtgatgatctactaaaacccctttagggcgccccgtcgttcccgacgtatagatcaagtaggctagatcacctggcggcatatttggagcttctgtttggtaactttctgtatgttctatcgttatcgtatttccttcataggacggagggatcaaggaaataaggtcttcttctatcagcaattgagccgcttgactgtccttcagcaggaaagaaagacgttctgctggaaaatgtggatcaagcggcatataagcgccgcctgctttccaaatcccaagcagagctgcaggcatttccattgaccggcccatcatcacagccacgatatctccagatctaacgcctttttctatcagggcgtgcgcaatctgattggctcttatatttaattggcgataggtccagcaatcgtctcccatttttaatgcagccgcttcaggtgttttgcgggcttgttcctcgaacaattggggtatcgttttgttcacataaggacgctcagtttcgttaaacgattggataacctgttgctcctccggcggcacgatattgatgtcactgacggcaacatcgggatttgtcaaaatgcaatccagtgcttgctttagatgcccctgaatcctcagcatctcctcccgctcgtaaacgtctgcgttgtagctgaatttgatataaaatgattctcccggaacgataacgatattaaagtcgtaattggtttgttccgacattgaaatgtcactcagcttcagagcgccttcgtcattttcactctccacgcttaatgcctgatgaagctgtacagggtaattttcaaaaacaaaaatatgatcgatcaacccttgcttcaatggactatggttttgaatttcataaagcggataatacccatgctgttcagatgataaaatatcctcctgcacggctttgaccagcgaagaaaacgttatgccttccgcagatcggattcgcactggaacagtattgataaacaagccgaccattgattcaatcccgtcaatcgctgacgggcgtcccgaaatgacggagccaaaaacggcatcggcatcatctgcagcattatatcgatggagcagcacgccccaaatactcataaacaacgtgtttaatgtcactccccagttttgggcagcctctgtcagtttctcaaccatttcctgcgctaatgaaaagctgacctggtcggctttataattcccgtctgccgtgcggcgctttattcggggaatagaagcagtattgccgtactccttcaaatattcgctccagtaggcagcggtctcttcttgatcttgttctccgagccattcaatataacggctgtacggcaccgtgctgccaagctgtacaggtgagttatttttgagcgaatcatacatgctgaaaaactctttaagaataatgccgagacaccacccatccatgatgatatggtgatgtgtccagacacatgtatattggctgtctcctctatcaaaaagggcaagacgcattaaaggatctttttgcaaatcaaatcctttttcccgatccttagtcataaaagcatcaatcagcgtctgctgttcttgatcagccaggcgagaaatatcttctctatatactgtcaattcccggtttgataagactacctgctgcggacctgtaagatctggtacttctttaatgaaaatcgttctgaaaatatcatatctagaaacaagaaggtttaagctcttttgaaacgagtcgacgcatagattccctgtgatcgtaaacgaggtctgttcgatatatgctttcgagctgaaatccattaatgaatgaaacagcattccttcctgcatgtgcgataacggataaatatcttgaatttgtgccgattgtgccatcaattccacacaccttttcaaaagttaaagatctttcacgagatcttcgatgctagataatgcagacaacgttaattccttattgctgaaatcgctcaatgttttttcgcgtgcttttttctgcgaacaatgctcaatcgtctcgataagatgcctgtgaaaacgatccataaaacactcaattgagtgtttgctgaacacctgggtgtataccgcttttacttgaagccgtccgtccgtaatgagagcgttaatgtccagctcatactctcgttctctctcacccgctatttcgtaacggggctggtaatatgataattgaaacgtatcagcttctttctcttcgctaaattgaccgagataattaaagctgacctcaggctctttatgccgcagttctcctatgtgtgttaacaatccgtatccagttcctttgttcggtactcttctcagcatatcttttgtcatcttaattcggtatgcgagctgatcctcgaaaggctcgggaatacccatgtctagcagaataggataaatggaagtaaaccatccaactgtccttgaaatatcaatgtttggcacatgcccttctctaccgtgtccctcagtgctgatcacgatttggtcatgcccagtccattcagaaagcgccaatcctaaagccgtaagcaaaagttcgttggcatcagtaccataggcttgctgggtttcaaacagcaatttttcagtccagtctccggatagtacaaacgcggctgcgtcgctattcatttggagtctgtccggcacattttctatgtccttaggaagaaaagcagtgtgagcgtctaaaatcgtttgccaatacgttttctctgaaagcaattgtttactttcagctatttgggtaagaccatcggcgtaggataaataagaatccgtttttggcggtaattggatttctttcttttctaaagcctgttgatatgctgcagctaaatcttcaagcagaattctccaagaaacgccatctatcacaagatgatgaagtgcaatcagcaaatgatccccttctgccgttttaaacaaacctgcttgcagcaaaggccctttttctacattcattttgctttgaatgacggtttcctcagcggcaagtttttcatcaagatgagccctttccagcgatgcttttgtccaatctgaaatataaaggccaaacagttcatgatccttgtgattgattccgcgattaaactgaatgacatggccgttttggtcacgttggaaaatcatgcgaatggcatcatgatgctcgattattttacgcagcgctagatgaagcgcgttagcattgaatcctttttcactgaaaagcatgacggactggttgtaatgatagtgaaaagcatgtacctgtccgaaaaatcttcgctgaatcggggtgagttcagcttcaccttccgcaggtccctggtccgcttgagatgccaatggtgtgatatgtccgcatagttcctgaatcgttgaataacggaataagtcgcgtattgtcatgctccagccttcagctgccagacgtgctgccacttgtaatgctttaattgagtctccgccaagctcaaaaaaggaatcgtgaatgccgactcgtgacatgctcagtacatcttcccatatatacgccatcgttttttgtatgtcgttaactggtgcggtatatggacgcgataacacattatttggagccggcaaggcatttctgtccagctttccgtttagggtcagcggcatgttttctaaaggaatcagatgtgcaggaatcatatacgctggcagctcctttgttaaagcagcacggagagcattcgtattgacgtctgaaggcacaatatatgctgccaaaccagcctgtccatttttatcatgctgaacggcaacagcagcttctctgacaagccccgtttgaagcagaacactttcaatttcttctgtttcaattctgtatccatttatctttacttgataatccattcggccaagaagcctgatcgttccgtttggaagccagcatgctcgatcaccggttctgtacagcctttctccagagacaaatggattttctgtaaatttcatttgcgttaagtcaggtttatgatgatagcctttcgcaacacctgccccgccgatgcacagctcgccggcaacaccgatcggctgaatttgatcagtctggctgagtacgtacatgtgtacattcggcagcgggctgccgattggtacgttatctcccgtacactctccacccatactggtttcatagaaactcgaatcaatggttgcctctgtgacaccatagctattaatgatgcgcatgctttggccaaagcgatctgtcaatgttttgaaatcttgagctttcaccatgtcggaaccaaggatcagcatgtctaagtcaggaagcttgaactggttacggtatacatactccatcaccgggataatgagagccggtgtcgactccatcaccgtgattctctgagagttcatgattttatatatttcagcaggttccagccgtgtttcatctgggcaaacgattagagtcccgccgttggtcaatgttctcgccaaatctcctgagaagacatcgaatgaaaagctcgcgatttgaagcagtctgacaggcttccgatccagttcataaatttgacgccaagcaagagcagcatgagtaaagttctgataggtgacaataacacctttaggcgcacccgtcgttcctgacgtataaatgatatataccggctcttcaggagcaggagataagttaaggttgcagttactttcttcataagtgctttcatcgtcaaggcagatatgagacatctcagattcaggcaagtttgaaatcaaatgcttcaattcctgctgtgaaagtagaatatctgccccgctatcacgaagaatatattcaatacgggcttttggataatgtgaatcgattgggatatacactccgccagctttcatcactgccagcactccaacaattgcatcaatggaccgcttggctaaaacagccacagttggcttcggtccttttctgttttgcaatgttcgtgccagacgattggctctttcatttagaagccgatagctaatctctgtttcgttatcaataacagctatatgttctggaatttcttcagctttcgcttcaaatatgcgatgaaaaggaacatctttttgagcaaattcaacctgagttttgttaaattcaaagactattttttgtttttctttatcactaagtatgtttatttgtgcaaggcttgtttcaggggttgaaagtgccgcatgcagaaattggataaaatgatcagcccaccgttcaatcgtagcttttaggaatacttctgtactaaattccatttcgcagcaaatagatccacttacttccgtagctattaatgtgatatcaaataaagaaatgtaatgtgcgaaattggcaggccggacttttatttctctcagatctatgtcctgtttttccacattttgaaggataaacatcgcatcaaacactgggttccggctcatatctcgtgtcaattcaagcttatcaacaagctgttcgaacgggtaatcctgatgctcaaaggcttccaatgctgtctcacgcacttcctgcaaatactgtacgaatggcttcccgccctccgggcgcgtccgaagcgccagcgtgttcacaaacatgccgagtatcgtctcaagatccttgtgcggccggccggcgattggcgagccgacgatgatatcttcctgtccgcttaagcgtgacaagaacgcggtgtaagccgcaaggagcaccatgtacagggtgcttccgttttctcgtgccagcttgtgaaggcctgatgcaacctcttgatccagcgtaaatgagaccttgtcaccagcgaagcttcgcaccggcgggcgggcatgatcagcggggagatccagcacaggcagctcgccctcgagctgcttcagccagtacgcctcttgcgttttgtacgcgtctcctgttttgaatccttcttgccatacggcataatctttatattgaatgcgcagcgccagaagcttccgattattgtacagctcgccgaattcttgaatcagaatgttgacggaaacaccgtctgaaatgatgtgatgcatatcaaccagcaacaggtgccgctcatctgatacctttacgatttgggcacggaacagcggcgcttggctgagatcaaacggtttgataaatgcggctgcggcctcctgttcggttcgttcgccgagaactgtagtctgtaacgtaaacggcacctcgtcatggatgcgctgcaccggatcgcctccttcgtcctgttcgaaggcggttcgaagcgactcgtggcgcttgatcagctcttggaaagctctgtccatcctttcagggttgagcttcccttcgagctctaacacagccggcatattgtagcctgtccctccgtcttccagctgctgaaggacataaatccgcttttgggcagaggaaaccggataggtttcctgtttttcagcgggcttaatcgcttcatatggactgtccgttccttcacggataacggcagccagtccttctactgtcggatgggcaaacacatcttttagcggcacctgtacatcgaattctttggcgatccgtgagacaagcgccgttgcttttaaggaatgtcccccgcggtcaaaaaagttgtcgtgaatcccgacagggccatttttcagcacgtcctcccacagctgagaaagcttcatctcagtcacgtttctcggcgccgtgtaggtctccgcatctgccgctccgccaggagctggcagggcgtttcggtcgagctttccgcttggcgtaaccggccactgttccatctctatcatataggctgggaccatgtagcccggcaacagtctctcaagctgtgcacgcacttcgtttctttggagcccttctacataagcgcataattccggctccccgctgtctgtccgtacggtaacagccgcctctcttacgccttctatgcttcttagtgccgcttcaatttctcccggctcaatccggtagccgcggatttttacctgatcatccgtgcgcccgaggaattcaacattcccgtcagggagccagcgcgccacatccccggttttgtacatgcgttcccccgggtaaaacgggtcttcaagaaaacgctcctccgttaatgccggccgattcaaataacctctggcaacacccgctccggcaatgtacagttcgccggcgacaccggaaggctgtacggctaaatgcggatctaaaacatacaaacgcgcaccgggtacgggcttcccaatcggaatccgcaaacgatccctgtcccgttctggatccaatacgtaaaatgccgcgtctaccgttgcttctgtcggcccgtaaccatggattaatgatacctgcggcaatacagaagcaaaacgggctgccgtacgcggcgcaagcggttcacctccggcgaatacacgcttcaggcttgtgctgtcacgcaacctttcgatttccgcttgatcgagaaagctgttcagcatagccggaataaaatgagccgttgtcacgttttcctgatgaatggcttttacgatcaatgccggatctttctcccagccgggcggaagcagatacgccgaagcaccggaaagcgaccaccaaaacagctgccacacagacgcatcaaaggaaaaagaggttttcaccatgacaatgtcatcttccgaaagcggaaactggtgctgcatgcctgtcagaaaggaaacagcctggcggtgctcaacggccactcctttcggctgcccggtagagcccgatgtatagatgacataggcgagagatccgccgtcagcaggagtaaactcatggttttctgctttttcgctcgcaagagatgtcatgtccacttcaagcgtttcgccagaaaagtttggtgcggagcatcccggctgtgtcagcaagagcgatgccccgctgtctttcagcatgtagctcagccgctcctttggatacgcaggatcaagcggcaaatacgcccctccggccttcaatacagcaaggacagcgatcagcatgtcaggtgaccgttcagacaggacaccgacgatactttcgtttgtgacgccgcgtgccgcaaggtgcgcagccagccggctggcgtacatatcaagctcagcgtatgtcagcgaaccgcctgaaaagcgaatggccagccgctccggtgtgaaagctgcctgtcgctcaaacagcccatgcagggtgaaagctttaggcgaaacagcttccgtcttgttaaactcatacaacaatttttgcttttctcttgtattcgtcatatctaattctcttataaagctgtgcggatgttgaagggcgttttccagtatggtaagcaaatgagattgtattcgtttaatatcctcaagagaaaacaaggtattttgatagtcgaaatttaattgaatggttccattgtctatccgttcttgtatttgaactgaaagctcattcgcggtgtatccgctgaaataaagcgctgtttcatagtcaaaatcatctgcattatgccactgaagtggctgatactgcatagatataccgataaggttgtgtaaatccttctgttcatttcttaattcatttacaagcaaattataaggaaaccgttgatgacgcataacagaaagctgttccctgcctattgtgcgcacaaaggaaagaaaatctgtgtcaggatcaaccgttattctgattggaagggaactaacgaacatgccgagcatttctttttcagcctttgaacctctgttgccatagtaggtgccaatggcaagatcttttttagaagtgattctgctgatgcatatgtaaaatgaagccataaataaggaaatgatattgatcttgtgttcttcgcagaagattcgaatcgtttgctctagatcaggtgaaagaatgatggtgtctctggatgcagatgtgctctgtttttgtaaggacgtctggtcggctaacgagtggtattccaacgggtgctcaaaggtttgtgtccaaaataaacggtcctttgcaaaccgcggagattgtagatattgactctctttttcgatgtagctcaagtaagaaggttccggctgatcaggtaaaggatctttctttttcattttttgataaagatctataatttgatttcccatcacatttaaagagattccatccattatgatatgatggaatttcgcaaatagccaaacttcatgagagtcaattctaaggaggtaaaattgaaaaagaggcgagttgaacagtttaaatggaatgctcgcttgatcctgaatccattgctctatttctatcatttcaacatttgaaaaatcaattattctaagtggataatatttatattcagtaaggtgcaatcgcggctcaagctcttctccttctaacagctgaaatctaatggcgtcgttgcgggagatggaatgattcagtgctccctccagagtatcaagctcaatattgcctttaaatttcacacaggctgtgagattgcaaatactggtatctggctccagcagttcggtaaaccacactctcctttgggcatgggttaaagaataagtatgttcgctcaacggattccctccagttctcataataagaggataagaaaatgtagaaaaaagcagaaaaatgacaataaaagaaattatatgactatataatccatatatgcactatattaacggatattttttaaagtacaataaaaaacattaaatttttataacatttttttgaatatagtattatttctttatttttcgtttctttttttatcaaatttccggatataaagtgataaaagtattgttttacataaggtcttatacactactttttaatcggactaatttgcttttgcccatcattcttctaattgttggaaggttcgacaaagcgttattacagacataaaaaaacctgttttctcttggaaaacaggtctgccgctattattgatttgccaaaatgacagcgatttgatcctcaatatcttttccatcctcttcatcaatcaatccatttagaagaatagagaaaacaagtttttttccgctctttgtttctgcgtaccccgatagagagcttaccgtactgagcgatccggtttttgctcttacttttccttgtgcaggagtgtctttcatgcggtttctcagcgttccgcccaccattctgtcaggattgcccgcaacaggtaaagaatttagataagccgagaaccaactctgatcctgaatgtcatataacagctgtgaaagttgatctgaggatacagcatcaatatgtgagattcctgatccgtctcttaagacgagtgatttagaatcaacaccaaattccggaagcgtactgtttaacacttcgagccccttttcccagctcccttctccttttttcactttccccatctcttttacgagcacttcggcatgtccgttattacttaatttcatgaacggcacaaaaagtttcgataaaggcattgagcgatgagagagcagcacatctgaagaactaggtgcttcacccgtcttgatgtcccctttcacagtaataccttgtttttttagtgactgcttaaataaatctaaggcatatccggcaggctcccagacagaaatccattcctttgtcttgtttgcgtcaaccggtacgctcccttcaattgtaatcgtgtttgttccatgctctctttcgattgtgaggtctttctctgaaccggcagcagtcgtttcagcatcgttctttatcgttatataatcggttttcggagagacagacacggcaggctcttccccttctttttgatttggggtgacctcaacaatcacagtgcctgcatcatagtcttcgtttggagacgctgttagagcggagattggcgcgccataatatgtgtattcatcgctccaaggcatatcaggtgataatcgcatgtcatcatgccacgtatcatcaccgatcagattgcctttaattacttttacgccggaatgtttcaatttctcagccattttgtcaaaatcagatggtaaaagtgtcggatcgcctttccctttcaaataaaggttaccattcagctttttccctttcagtgttccatccgtccggacctcggttgtaaaagaatagttctcgccaaggacagaaagtgccgcggccgctgtcaaaagctttagagaagaggcaggcctcattcgggtgtctcctgaatgttcatatagaacagcacctgtttccgcagagcgaacggtgatgccggccattgcgccttcgagggcaggatgatcagctaaaatcttatcgatctgcccggaaagtgcatcttgtttttcagcggcaagcgcagcctgatgcatataaggcaccgaagcaacgacgaaaagcagtaaaacagcaacataaagctttatgctttttttcattcatttccccgcctctctgcgcttcatcattggctattgatgattcagttcaatggtgatactgcttttagctgtcgtttcttctcccggctccagcacttgtaaaccagtgagtgacgaaggtaaatcaagattcactgcgtttgtcacccatgtgtaaggctcagggcataaatacccttgttttccgtccgcattgtatacaacccaatgtttaaactgttcatctgccttataaataatgctattatgtgcatgctgatgataaatgactgcctggttttctccgcccctcttctgataagaagataaaaagacatcatccagctgcttgtggcgcaaatccattccttcatgcaaagcttctttatacgggacatccatcagtttccctgtcggcagcaggcgttcatccaactcccattgctgatctgctgtcagggaaaataatgagctttctgccggaaatataaatgtagtatgataaccaattccccaaggaaacgcttcctttcctttgttcatgaccgtcgcatgtttaaatagagtattcccctttaccgtgtatgtcatccgaacgacggcatggtgaggaaattgcttatacacatgggggagcccagaaagatcaatttctgtttcaacaatcacttcttcatcagttttcttcgcggtcactacgttccacttttcatggtaaagaaacccatgaagatggttgtgtttatccttctcgttgatatcaaaatgatacgttctgccccggaaactgaatgtaccgtcacttatgcggttaggcgggaacaggattggaatgccatacaatgttggtgtgtcgtgaaaactttctgctgtttccggttcacgcaaaagctggacatttgttgttttgtccacgagagaaatgacgttgctcccccactcagggacaacaatcatttctagatgttcgttgcccgctttgatggccggcgttcccaaatacgtgattttctcaataaagtttgccatgtttactcaacctctccttgattcattgctagtataagaattcaatgtactgtaccatatttcctccattttatattttcccctatcaaataaaaaaacaccgttcaaacttatgaacggtgtgattcggaggctattggatgagacgtgtgatttgtttctttttccagacgaattgataatacccataaatcaacagcaagctgacggcaaacgcagctggataaccaacccagacgccgagtatttcaagctttgtatagtgagaaaggacgaaagcgacaggcacctctactccccagattgcaaaaatactgatgacggtcggccataaaactgttccgcttgcccgcatcgttgcagaaataatttgggcatttccaaacagcaaatagctccacaatgtaatcatcaaaagacggtgcgcaatgtaaagcgtctcttgctcggttaaaaataacgataaaatctgatgtgaaaaaacatagatcagaatgatcagtacgccgccaatgatataattcagccaaatccccacgcgaatgacctgctttaagcggtcaaactcgtttgccccaatcgattgcgcagcgaaaatagaaaccgcaataccaaggctgacggccggcatctgtacatagctggctacctggttgaccactccgtatgcagctgttgcattagagccgtaatgattgacgaatgaaataaccgctatctctgataatgagacaagaatcatattgatgcttgctgggaccccaagacgcagcaggagaaccagcagttccttatccattttcaaataacgacgcactgttttatcaaattgcagcgggtgttttcgctttcgtaaatacaccattaacacgagaaaagtcgcaatcgtggaaatgacagttgcatatgccgagccgtatatgcccagtttcggaaaaccaaacatgccaaggattaaaacaggcaaaagcgcgatgttgatgaccgtgctcacaatcagcgtataaaacggtgtcttagaatcccctgttccgcgcaaaaaggtagtatatgcaaaatataaaaacataaacggcatagcataaaataaaatacgtgcatagttagcgctgacatgaatgacattttcaggcgttcccattaaacgaaggatatccagggtgaaaatactgccgatgacggctaacacaacgcctaataaaaatgtaaacgtgagcgtcgtcccgacaacagcctttagccgttcctcatttttcgctccgtaagcttgtccgatcagaatcgaactacctgaaccgatcccaatcgtaaatgagattaaaagaaaaaataacgggaaaaaggatgatacagctgccactgcatcaacaccgagccatctgcctacagccatcatcccgactagctggccgactgattgcagcacattgctcagcagaagcggcaccaaaaagagtgacatcgaccgccaaactgatggtttgcttttcttttgagttacaagaggttcttgtgatgtttccatattaaaggactcctttatttgaaatcgtttttaaacatgccctcattttttgacaaaaacaggatatgcaacatgttattattcatcactgcacatatgaaacccttcccgattcttctaatttcacacatctttttagcttatgaagaataaactagcaagtaatggcgtattttttgtgagtaaaagaataaaaaaataatttatgcaaaagtattgtaatctatccgtaattattgtaacatttgtaacataagagaaagagattttgaaggagagagcgataatgaaaaaatgtcttctatttctaacaaccattgcacttattctgtcattaagcacaaatgcatttgcgaaaaatacatcaggcaatttatcacaaaaacaagcattacagttggcattatccgctagagaacatttttggaacaccatgagcggccacaatccgaaggtgaaaaaagcagtttgcccatcaggcacattcgagtatcaaaatcttcaatatgtatacatgtgcagtgatctaggcactaaagcaaaagcggtgaattatttaactcctatttttacaaaaacagcaatcgaaaaaggctttaaagattatcatttcactgtttcaaaaggaaaacttgctgttccaatcggtgacggagacaatcttttgaattggaaaaaatcaactgctaaactgatctctaaaaaaggcagcacaatcacatacgaatttaccgtccctacattagacggatccccttctgcaaaacggaaagtgacatttgtgaaagaaaataaaaaatggaaagtcaatcaatttgacgcagttatataagaataacgcccggtataagcgggcgttttttatttggtctgcataaagaaagacaacaggcgaaaagtgcctgttgtctttttgtgaatataacgctctaggagagattcgaactcccgacctgcagtttaggaaactgctgcactatccgctgtgctactagagcttttggtatttatatagtagctctgatgatcaatattttcaagcgatttgtattaaagccctccaaaaaccttatatgcggctcttgtcgtatcttcatcaataccgatataccgcattgtaattgatggtgatgaatgattcagtattctctgcagctcggcgatgtctttcgttcgctgataaaaatgatagccaaacgttttccggagtgtatgcgtccctatctcctcaagtccgcacgccgcagcggcctctcttaaaattctgtaggcctgaatgcgggaaatcggcttcctggtgcgcactgatttaaaaagatattcgttttccttcatgtctttcgtatactcgtatatttcctgtttcagcgattctaaaataagaatctttcttttctttttcgttttgctttcagtcgcccataaatgatctttattttgaacgtccttcacttgcagcggcagaatatcagaaatgcggagcgcgctgttgatgccgaaaataaacagaaaataatcccgcttgtttttgttaagcaaatactgtttgacttcttggattttctctagactgcgaatcggctgtacaatatgcatcaaaaaactccttaaaaacagttatgtaacgttttgaggtctatgttactattatagctgaaaaacgttgaatgtcaaagtgcggcggcgtttatgtaacataatatacatagtgttacataagcttttaaaaaagcttcttcaaaccttcaccctataaaataagctttaaagcctcttataaagcttttaacctcttggatacttatccccctactaatcatcaaaaatcctcttaaaacgcaatctgacgctcccaattttctggagcttccgcaaaaaaacataaaaaaaagacacaacttcaaattgtgtcctaatcctcatcctttacatcaatatcttccgggattggttcatttaatatttcctgcacaagtgctttgtaattctccagctgttcgagatgcgttttgaactgctctttataaatcaaaaattgctctccgtcatgaacggctctgattttcccttcgagcaccaagcttttaatataatcctctgaaagatttgtatattctgctgtttcttcaatcgttaaatacatatagcagtcccttcttaatccgtatgctgattctaatatagcacatggctcatatcaatataatcaattttgcacagaaaaacggcattatgcactatataatataccatttgtcacttgtgaaaacgctgtaatttttttacgctaagattgtaacaatacagcttcatataggagggagaacatgaaaagaacgtggaacgtctgtttaacagctctgcttagtgttctgttagtcgctggaagtgtcccttttcacgcggaagctaaaaaaccgcccaaaagctacgatgagtacaaacaagtagatgttggaaaagacggcatggttgcgaccgcacatcctcttgcttctgaaatcggtgctgatgtgctgaaaaaaggaggaaatgctattgacgcagcggttgccattcaatttgcactcaatgtaacagagccgatgatgtcaggtattggcggcggcggttttatgatggtgtatgacggaaaaacgaaggatacaacgataatcgacagccgtgagcgtgctccagcaggcgcaactcctgatatgtttctggacgaaaacggcaaagcaattcctttctctgaacgtgtaacaaaaggtactgccgttggtgttccaggcactctgaaagggctggaagaagccttggataaatggggaacccgttcgatgaagcaattaattaccccttctattaaactcgctgaaaaaggctttccgattgattcggtgttggcagaggccatttctgattatcaggaaaagctttcacggactgccgcaaaagatgtatttttaccaaatggcgaaccgcttaaagaaggagatacccttattcaaaaggatttggctaaaacatttaagcttattcgctccaaaggcactgacgctttttataaaggaaaattcgccaagacgctttctgacactgtccaggatttcggcggatcaatgacggaaaaagatttagaaaattacgacattacaattgatgaaccgatttggggagattatcaaggctatcaaatcgctactactcctcctccaagctccggcggtattttcttattgcaaatgctaaaaatccttgatcattttaacctttcacaatacgatgtccgctcatgggaaaaatatcagctgcttgctgaaacgatgcatttgtcatatgccgaccgtgcgtcttacgcaggtgatcccgaatttgtaaatgttcctctcaaaggcctgcttcaccccgattatattaaagaacgccagcaattaatcaacctagatcaagtgaataaaaaaccgaaagccggtgacccttggaaataccaagaaggatcagcaaactataaacaagttgaacagccgaaagacaaagtagaaggccaaacaacccactttacagttgctgaccgttggggaaatgttgtttcttatacaacaacaatcgaacagctattcggaacgggtattatggtccctgattacggtgttattttaaacaatgaattaacggattttgatgcgataccaggcggagctaacgaagtacagccaaacaaacggcctttaagcagcatgaccccgacgattttatttaaggatgacaagcctgtcctcacggttggatctcctggcggggccacaattatttcatccgttttgcaaaccattctctaccatatagaatatggtatggaattaaaagcggctgttgaagagccgagaatttatacaaacagcatgagctcttaccgttacgaagacggagttcctaaagatgtcctcagcaagctaaatggcatgggccacaaattcggcacaagtccggtggatatcggaaacgtgcaaagcatatcgatcgaccatgaaaacggcacctttaaaggtgtagctgattcaagcagaaacggcgcggcgatcggcattaatttaaaacgtaaataaattaaaaaactgtactcgcttcaaatgagtacagttttttatacacatctttaaaataaaaactgacaaacgtctttattctgctaatgcacgtctatcttcatcttttcatttcgtttatctcatcaagaaatgtctgaaacgcactcgtaataaaaaagtctttcctgtatataaagacgatctctaagtcttgatatgctggtggcagctgatgaatccatacatttgtacgatgctcggagcagtcaacagcggactttgggagcagcgccgtacccatcccggcggaaacaccttttataatagcctccaatgtgccaaactctatgattttttgattgtgtatgcctgcttcctctagtaatcttttgaccctgtcacgatgagaacagccagccccaaaaaagagcatcggctgctgaagcatgtcttctgccgtcccttctcgtgatgaaatcaaaactaattcatcataggagacatggagttgtctaaccgcagcgtgttcaaccggcccatatacaaaagcgccatcaactttatgatcaagaacctgttgaatcaaatgatgcgtatcagctgtgttcactgataaatccacttcaggaaaacgcctgaggaaggatgctgcatgctcaggcagatgcgttaccgccgtcgtttccagtgatccgatccgcaaaggcccttttggttgcctgctcattcgggtcgatttttcagcttggtctaacagcgataatacttgatctgcatattgtaaaagattttctcctgcagcagtcagcttcattccccgattcgttcgatgaaaaagcctgatattcaaatcttcctcaaggttatgcactctggctgtcacattcgactgaacataattcagcatttgggctgctttcgttatgcttccttcgcgggcaacagcctgaaaaatctttaaatctccgctttccacgcgctctcacctgcttgctatgatgaaaagtgatattggctatcatatttgttcattttactcgaagaaaaccgctatgtaaaatatgtaaagatatgaaaatacaattcaatgaggaggcagacagcatgaaagctataattcacaacggaaaagccggtcttctggggttatcagttcaggacgttccatcaacaaagcctggatacggagaggtaaaggttaaattaaaatctgcaggcctgaatcatcgtgacttgtttcttatgaaaaacaaatctgaacaagatcctcacataatactgggttctgacggcgcgggtatcatcgaagagattggtgaaggcgtgaaaaatgttactgttcagacagaagtagtcattttcccgacattgaactgggatttgacagaaaatgttccacctgtacctgagattctgggaggtccttcggacggaacacttgctgaatatgtgatcattccttcacaaaatgcaatcaaaaaacctgcttatttatcttgggaagaagcgggcgttttacctttatccgctttaactgcatatcgggctctgtttacaaaggggcaattaaaaaaaggcgagcatctattgatacccggcatcggcagcggtgtagcaacctacgctttatttatggctaaggcgattggggcaacagtaagcgtgacctcccgcagtgaggagaaaagaaaaaaggcgctgaaattaggtgctgattacgcatttgacagctacagcaattgggatgagcagttgcagggaaaaaaggcggatgttgttcttgacagcataggacctgccctcttttcggaatacttccgccatgtaaaaccaaatggccgtattgtcagctttggggcaagctcaggggataatctcagttttccggtgcgttctctattctttcctcaggtcaatgttttgggaacctcgatgggaagcggtgaggaatttcaagctatgctcgctttcattgataaacataagctgcggcctgtaattgaccggatatatcctttagaaaaagcatgtgaagcatataaaagaatgcaggaaggcagacagtttggaaacatcgggatcgtaatggaataaaaaaagaaaccggctggcagccagaccggtttctcttatatgataatcccctttatttacggaagaactgaactccccatcaaatatcgatccacttcacgcgccacttctcggccttcattaatcgcccatacgattaagctttgccctcttcttgcatcccctgcggcgaatacaccatcgatatttgtttgataatccccatatgctgcactgattttgttatttacagaatcaacaccgaactgtttcaacagcggctgttctgtgccttcaaagccgatagcgataaagacaagctgagcaggccatactttttccgttccaggcagctcgcggaactcgtatttcccatgctcatttttcactttttccatttggatggtatgaagctctttcagctttccgtttttatccgcaaccatttttgtcgtttgaatggagtattctctcggatctcttccgaattttgcttctgcttcctcgtatgcatattcaagcgtaaagacgtgtggctgttcaggccacatattgtcattcgtgcgggctggcggaagtttcgggtgtttgccgaattggtgcacgcttttggctttttgacgcagagcagtagccacacagtcagctcctgtatctccgcctccgattacgatgacatccttccctttagcatcaatgaattgcttgtctttaaaattagaatctaaatagctttttgttgcaagtgtcaggtagtccattgcgtaatggactccttttgagtcgcgtccttcaattaagaggtcccgctgtttttgagcgcctgtgcataggatcacagcatcaaattgctcctttagctcatcagctgtaatatcaacaccgatttctgtgttcgtgacaaaatcaattccctcttgcgtcagcaatttaattcggcgttctacaatgcccttctcaagcttcatgtttggaatgccgtatgttaaaaggccgcccgctctgtctgagcgctcaaaaacagtgacagaatgccccgcttgattcagctggtcagcactcgccagtccggctgggcccgacccgacgatagcaacttttttgcctgttcgtttttttggaattctaggttgaatccagccgttctcaaatcctttatcgataatggtccgctcgatgtttttaattgatacggccgggtctgaaatcgctaaagtgcatgatccttcacaaggagcgggacatacccgccctgtgaattcaggaaagttgtttgttttcaacagacgttccaatgcttccttccatctgccccggtagacaagatcattccattcaggaattaagttgtaaatcggacagccggatgtaaatccgttaatgtccgcaccgatctggcaaaacggtgtaccgcaatccatacaccgcgccccttgccgtttcgatgcttcttctgaaaaaggagcagaatattctttccaatcctttaagcgagtgagagggtcccgctccgcaggtttttctcgtttgatctccataaatccagttggtttccccatgttcctctccccttccttactgtactaccgcttgtttttgtcccgatgctgctgtattctgctttggcttcgtgttggcctcaaaagcgaacatgatggcttcttcatctgataaacctgcagctttttgctcttcgatgcttgcgagcatttgtttatagtttttcggaatgactttgacgaattttttcacactgtcttcccattgatctagcagatcttctgctttttggctgtttgtatacgcagtatgtctttcaagcattgctttgatttgctggatttctttctcatcctctaatgattcaaataaaatcatctcaaggttgcatttgcgtttaaacgctttgacatcttcggtcagtacataagcgattccgccggacatacctgccgcaaagtttttgcctacatcaccgagaacgacaacgctgccgccagtcatgtattcacagccgtggtcgccgatgccttctacaactacgttcacaccgctgtttcgaacggcaaagcgttcaccagcacgtccgttaatatatgcttctccgcttgtcgcaccgtaaaaagccacgttgccgataatgacattgtcatccgaagcagagttgaatccttctggtgacttgacgatgatttttccgccagaaagcccttttccgacgtaatcatttgagtctccgtctaaataaagcgtcatccctttaggaacgaaagctccaaagctttggccggctgatccggtaaagtgcaacttgattgtatcttcaggaagaccttcttctccgtaacgctttgagatttcactgccggttatcgttccggctacacggtttgtattgttgatttcgatagaaacttccgcttcttttccagattcgatggcttcttgtacggccgggagaatcgctgtaatatcaagtgattgatcaattttatgattttgcggcgattggaacgtccgcaccccatcaggctgataaagaagggtagacaaatcaagctggcttgctttccagtgctcctttgcccgttcacttacatgaagtacatcagtgcggccgatcatttcatcaaatgtcttgaagcctaacgcagccatatactcacgaacttcttcggcaatgaacagcatatagttcacaatatggtcaggatctcccatgaactttttgcgaagctctggattttgtgtcgctacaccgacagggcatgtatccaaatggcaggcacgcatcatgacacagccgagtacaactaacggagccgttgcgaaaccaaattcttcggcgccgagcaaggcagccatcacaacgtcgcggcccgtcatgagctttccgtctgtttctaatacaacacggtcacgaagtccgttcagcattagtgtttgatgtgcttctgcaaggccaagctcccacggaagccctgtatgtttaatactggttttcggagaagcgcctgtacctccgtcatagccgctgatcacaatgacatctgcagtcgctttggcaacacctgcagcgattgttcctacacctgcttttgacaccagctttacgctgattcttgcgtcacggttggcatttttcaaatcgtggatcagctgggctaaatcctcaatcgaataaatgtcatggtgtggcggaggtgagattaatccgacacctggcgttgacccgcggacatcggcaacccatggatataccttgttgccaggaagctgcccgccttcacccggcttagcaccttgagccattttaatctgcagctcatcagcattgacgaggtaatggcttttgacaccaaaccgtccggatgcaatttgtttgatcgcacttcttctatcatcgccgttctcatctggaacaaagcgtttgggatcttctccgccttcaccgctgttgctttttcctccaagacggttcattgcgattgctaaagcttcgtgcgcttccttactcaaggacccgaatgacatcgcacccgttttaaaacgtttgacaatcgattcagcggattcaacctcctccaacttcaaaggcttgcggtttccgtcaaatgcgaacaagttccgcaaaaatccgatgcgttcttcatcagccgcttttgtatactgtttaaacagattgtaatcatttctgcggcacgcccattgcaaagtatgaatcgttttcggattaaacgcatgatgctctccgccatttctccattgaaagtcacttcccggttcaagcgttttgctgtaatcatcctgatacgcttcccggtggcggcgctgtgcctcttctgcaattgtttgtaaatcgatgccgcctagctgtgatgcagtacctgtgaaatagcggtcgatcacatcgcggctgattcctaccgcttcaaagatttgggcgcctctgtagctttgcacagttgaaattcccatcttggacatcacttttacgacgccctcagtaatgctttttccatatttgctgaccgcttcttcatagctgatatccaaacggccttcatcaatttcctgcttgtaggtcgcataagcgagataagggttaatcgcatctgcgccataaccgattaacgctgcaaagtgatgcacttcacgtgcttctcccgattccacaataatgctgaccttcgtacgcagccctttgcggattaagtgctggtgcagcgcgcttactgccagaagcggcggaattggtgtcagtcgttcgttcatctttttgtctgataaaattaacaaacttacgccttggctgatggctttctctgcttgtgtgaacatgtcctttaatccgcgttcaagatcctctgaaaacagcacatcaattttttggctttttaaatctggatgaacaatcgttttcaatgcgtaaaactgttcattggataaaacaggtgtatacagtttaatccggcgaacatttcgttcacttggatgaagaagatcgccttccgcaccgagccaagtcatcgttgaagtgacaagctgctcacgaatcgcgtcgattggcgggttcgttacttgtgcaaacagctgtttaaagtagttaaacagtgattgcgctcggtcagatagtacagcaagcggagcgtcattccccattgaaccaaggggatctttgccttctttaataacaggaattagatacttttggatatcctcatatgtgtatccgaatgccttctggcgagtaagaagatcactaaattgttcttcttctcttgactccggatcaggatttacttgtacaagctcttcttcaagccatttttggtacggatactcagttgcaatttgtgttttgacttcctcatcggagataatacggccttcttccaggtcgattaaaagcattttcccaggctcaaggcggtttttatataaaacgttctcctgttcaacttcaataacgcctacttcagatgagaaaataatataatcatcttttgtgacataataacgggccggacggagaccattccggtcaaggattgccccgatttgtttaccgtcagtaaatgaaatggctgtcggtccgtcccaaggctccatcagggagctatggtactcgtagaacgcccttttttccttggacatatgcgtattttccgtccaaggctctggaatgagcatcattgccgtatgtgccggtttgcgtccagccatcacaaaaaactcaaatgcgttatccaaaatggaagagtcactgccatcagcattgagaatcggcaaaatcttgtttaagtcctcaccgaagctttcagaaacaaattgctgctcacgtgctctcatccagttgatatttccgcgaagggtgttaatttcaccgttgtgaaccaaataacggttaggatgcgctctttcccatgtagggaatgtattggtactgaagcgtgaatgaacgagcgcaaaagcagaaacgaatgcttcgtcttgcagatcagaataaaatgcatcaacctgttcaggtgttaaaaggcctttgtaaacaatggtctggcttgaaagactggcaaaataaaaatcaagatcttccgttactccccaattttcagcctgtttacgaatgacatacaattttcgttcaaaagataaattgtcctttagatcagaacttgcgccgataaatacctgacggacaaacggacagcttttttgcgctactgttccgatttttccgacatttacaggtgcagttctccatccaagaacgacttggccttcttgttcaatcagtgcattgatttgcttttcaattttttttctttcatcttctttctgtgagaaaaagaccattcctaccccgtaacgttctttttctggcagattgatgtctttgcactcttttctaaagaaagcatcagggatttgaaccagtaagccggctccgtctcctgtatccggatcactgccttgccctcctctatggtctagctggcaaagcatcttaagtccttgtttgacaatgtcgtgagtctgcttgccctttaagtgtgcatataggccgattccgcatgcatcatgttcaaattcaggacggtagagaccttgagcttttggcatttgattgtacgtcataattcctctcccccgatcaatttccgataataccggtcataaaatctaacaactctataatcattgtaggttttcaaaacgatataaacaatatataatttagatcaaaagaatctcaaaatgagatagatggatgtgagacaaacatggagctgcgccaactgcgttatttcatggaggtggctgaaagagaacacgtttcagaagccgctgatcatttgcatgtggcccaatcagcaatcagcagacaaattgccaatcttgaagaagaattaaatgtgaccttatttgagcgtgaagggagaaatatcaaactcacgccaatcggaaaagaatttttgattcatgtgaaaacggcgatgaaagccattgattatgcgaaagagcaaattgatgagtatcttgacccgcatcgcggaacggtaaagatcggctttcctacaagcctcgccagccagcttttgccgactgtcatttcagcgtttaaagaagaatatccgcacgtcgaatttttgctgcgccaaggctcctataagtttctgattgaagctgtcagaaaccgcgatattgatctggccttattaggaccggtgccgacgaatttctctgacataacgggaaaaatattatttactgaaaaaatttacgcgcttgttccattaaatcatccgcttgctaaacaaaaaacggttcatttaatcgatttgcgcaacgaccaatttgtattgttcccggaaggatttgtacttagagagatggcaattgatacttgcaaacaagcaggctttgctcctctcgtttccacggagggtgaggatttggatgctatcaaagggttagtgtccgcaggaatgggcgttacccttctgcctgaaagtacttttgctgaaacaacacctcgttttactgtgaaaattccaattgagttccctcaagtaaaacggactgttggaatcattaaaccgaaaaatagagagcttgcgccttctgcgaatgatttttatgagtttgtcattcaatttttctctaagctggagcagtatcaataaaaaaatgaacccgagcttctatatagaagcttcgggtttttttctgcaaattaatttacaggtaaagaaaaatccacatggcaaacaaaggcttcttgatcaattagagctctgtttgtcagttccttgttcttttccggttcttgaagctgtacagaagagtaattgacgattccaaggccgatttccgtcccttttgaatccattagccgaacaactgaaccgcttttaaatttccctttaatcttctgtacaccgtctaggtataaactcgattggccgtttgttatttttcgtgaacaatcatctgataaaatcatttcaccttccggaccggaattaaaagcgatccattgctccttttgattcaacggaagcgttccttctgcttcaaaataggtgccttccgcctgttcatgaacggcgtgatataaaatatcgccggcatctgcctgaccaaggaaacctttaatgccagacgccattacgattttaaacgcatcaagcttagagcgcatgccgccggtgccaacgatgcttccagtgtcacctgcgcatgcttcgatgtcaggtgttatttcactcacccgctgtatccttttcgcttctggatttgtgcgcggattgccgtcatataatccgtctatatctgataaaatcacaagcatatctgcatcaatcaatcctgcgacttttgccgcgagtgtatcattgtcgccaaacttgagccgattgacggtaactgtatcattttcgtttatgatcgggatgatgccgcgctcgagcagtacattcattgtattcctgacattgttgtatcgatattcatctgaaaaatcgcttcttgtaattaaaatttgggatgcgacatagccgtgtgccaaaaacagctttgaataagcctccatcagcaatccctggccgattgaagctgatgcttgtttttctggaagcttctcgggcctttggataaatccgagtttccgatatcccgccgccactgcgcctgaggaaaccaaaattacttcataaccggcgtctttgagtttgacgacctggtcgaccaacgcttctaattttcgaatgctgatttctccatgaaggcttgttaatgaactgcttccaatcttcacaacgactcttttcatgcttgtatcaggcgtcactttatcactcctgatagcggcgctgcagttttttcgatatcttcgctgatttcctttgaacgcttagccgcatgctttatcgcttgagaaatcgcttctccgccgccgctctttttcaaggcttgcagccccgctgctgtcgttccgttcggtgacgtgatattatctcttaagatctcaggatgttctcctgtttccatgagcatttttgcggcacctaaaagtgtctgtgcgccgatgcttcgagataactgtttatcgaggccagcttcctcgcctgtcttttcaatgaattccattaaataataaaaatacgcggggccgctgcctgcaattccggtgaatatatccatttgattttcttggattgtatagacttcgcccatgcatccgagcaatgcttcggccagcttcttcaggtcttccgacacatattttccaagggcaatagctgttgcagaagcgccaatcatactggaagtgttgggcatcactctgacaaccggctgttcattaagcaatgattgttcaataaaagaggtagttatgccggcaaggaccgacaatattaattgatggggttgaatacgtgattttagtgatgacagagcgttttcggcgtcttttggcttcattgccaaaatgagcacatccatgtcttcaatacatagttggttcggcaaggcgcctttaatgccatattgaagttcaagttcagttaatcgctctgtattgctgcggtttgtaacgcagatgttttgtttcgggattttgttggcacgaacgatacctgatatcattccttccgccatagatcctgctcctataaaggctactttcttttgatcaaagatcggtaacatctcctttgttcgcttttttgttcgcattttcacacgtttaaaatgttaccacgtgaggaaatgatgtcaagtttgaaggtcatcattgatttgtattgtttcttttcgacaaatatgtataatgaaaagcagaaaacacccggttcacactgctgcgccgggtgtttgtttctattaaaaattatctgagagagctttttcaatcagttttttacagcgatccagctctaccttcagctgttttttatatagcttggcggcttcgtaatctttaaattgatagaggacgacttcctggagcttagccccttctttttttactttaatttgttttagtatcccgtcatcaagaagctcatgcaaagaccggtatacttctgtatgatttggtttaaaaccaatctctttaaattcagaccgaagtacttcaagcagctttaacccatagagtctctcttgctctgtcatcgttatcatataaagcttcaaaaatgcgcgctgtttcactaaaaagcctgttgaactccttttttcttctttcatcatatgcactccttcttctgtcactgacaacactatgtactaaatattcaattttcttttattgttttccttctttatattaaagactgatagtccagtcatttcatatttactgattataggtgtagcggaaaaaataaatttcgactgaacatttggtacatagttttcttagttctattatagcctgcattcactgccagcttcaatttaaaacgattgtcagatttgcatatgccggtatgaatttcattcaaataaaaaaacctgtcgaaagacaggttttcatttttaaggatttgttgaccataatcccgctgttttgatgaaaatgcgtggatctaatttcaattgtgccaccatgtactcagcaagatcctcaggctgcatcactttttcagggttaccgtctgttaagttcaattcgatagacatatcactagcgacagtgctcggcgttaacgcgctgactctgatattatgttttctcacttcttgcataagagactctgttaaccctagaacggcaaatttagaagcgctataagcacttgttacagcagctcctctttggcccgctgtagacgaaatattaatgatatctccggctttgcgttcgatcatttccggaagcaccgcgcgagtcacatgatacacacccattaggttgacttgtataatattttcccattcatcggctgacagatctaagaaaccgccaaatttgctgattcccgcgttattaatgagaatatcgatatcaccaagctgttctttcacttgagcgacggcttggttaacctgctcggcatcttttacatctgcagcagcaaatgcagcttttacaccaagcgctttgacttcttctgccactttttcaacattagcggcagtccggccgattaacccaatatttacgccttctttcgcaagagcaagagctgtagcacggccgatccctctgcctccgcctgtgattagtgcagttttatgttgtaaactttgcaattgaagcaccctttctttgtttacatatgtacgatatcacattataagtacaatacatccaatacgcaaatcaaacgaactgtgtaaatatcatttcttctgattaaaaaagcggatacagggtaatgacataagaaaaggagtgaacatatgattatagtttatatcagtcttgtagtattagcagtttctattatcttcttaggagttaccgtgattcaaaacaagaaaaaaatggaccctgcactaaaggagctttcctctgttacgcaggctatgcaaaaacaaatcgaaggattaaaaacagaaacagagctgctgacgcaaaaacaaaagaagattcagcaggatgtccaaataaaaaaatacacgtttcagcagaccgcagctgaagtgaaagaagttccccaagcagtcaaagaggtgtggcaggcaggacattttaatagcagataaggatgaatgagatcccgttgttacgatcagaatggacaaatgggatctcatttttcgaggaggcttacacatgattataaaccgcagctgcttaaaagagttcgcagaaaaagtacattttcttccctcttcacttacaaagtccgatttacttactgatccatttcgtctccatcaagaaaacgaacttggcatctactattcacctcataatgaatttatcaatcgggatgcctcgcttgtgattgccgggatcacgcctggtttttcccagatgaagacagcgtacgaaacagccgccgaaagcctgcggcaaggcgggactcttgagcaaatggcagtagacacaaaaatagcagcgggtttctccggatcgatgagacataaccttattaccatgctggatttatgcgggctgccgcaagcttttggcattcaaagcgccgcaaagctttttggagaattacggcatatgctccatacaacttccgttattaaatatcctgtctttatccagcaaaaaaactataccggatacaaaccggctatcactcattctcctatcctaagcacttatgcttttgggcacttccctgcagagcttaaccatgtgacgggaccagctcttctcattccgttaggaaaagcggccgaaacagtgtgtgaaacattgatcagacagcacagcctccagaatttgatttgccttaacggctttccccatccatcaggcgcgaacggccatcgtttgaaacaattcagcaaaaacaaagagcaactagaaagacaaattcgttcctttgctgcattggttgatttcgctatagaaaagaggaaataaaagggatatgataaacaaaaacacaaacgtggggagtggttgaatgtttcctatattagaaacggatcggcttatacttaggcaaatcacagatcaggatgcggaagccatttttgcttgtttctcaaacgatgaggtgacacgctattatgggcttgaaaacatggaatctatagaacaggccatttcaatgattcaaacgtttgctgccctctatcaagaaaaacgcggtatacggtggggaattgaaagacgggacactaaagaactgatcggaacaattggctttcacgctctggcccaaaagcataggcgcgcggaaatcggttatgaaatcatcccggagcattggcgaaacggatttgcatcagaagtcatttcaaaggtcgtatcttacggattttctgcccttggactgacgcgtattggcgcagttgtatttaccgctaatgaagcatcaaatcggctgcttctaaaaatgggttttcaaaaagaaggcgttttaagacagtacatgtatcaaaatggaattccaaacgatacaaatgtatattctattttaaaatcaagcaaatgaacggacgacattctctcaatctgtatgcacactcccttcctcttcttggtgactgcccaaaatagaaggggcagccagcctctgcaccgactccagtatgggacagtaaatgctaaatagcctgatagaacacatcacaaaatatagtgaagaggcttattctttttcttgccccgcatgaatgatctgtgatgtaccaatggtttggccagaagaattcaatgctttcacctgaaaatatggcccaatcgaatgaacaagaatatctgtttcaaatccggttcggggagcatccgttcccacctcagacaatttgttaggtgctgtaccagctaacactttccaggctacagtttcagttgaaccgttccatgatgcataaacaatggctgcatcttcacataatggatttacagcaatactgggtggataaaacggcaagcctacccatttatccttaaacgccctataagaaagattttgaccaggaaactgcatatcatataacaaattcaacgaaggatcttttttattattaccagcactcctatattcagaaagatacggttcctgtccccatccaacgaattgatttccatttgatagtttctgaacatttccttgacttggaacatacagcgctggatcatgataataagttcgatctgcttttgcagtcatgttatggaaatcaagttgaaggattaaaccacgagcctctccctcaggcggagagcttgaagaagcacaacaagcatcatcaaatagacttatccgtgttctagacctaaaacgtgcatcatgttgccaagaaaatgttgcatttggctcaaaagtaaaatcgctttttttgccaccaagctgccagacaatctttcctgttgttttatcaaccaaataaatcgcccacatgttacgcatgcttattagaagagtattgttcggcccttcctcaactgaattcacgtgaaaacagtcccaaatattgttagcgcttgtggcggatgacgcaggtaacatcgagtcatccggattaacatgagcaagcacatcccagaagaaaagaagctctcctgtctcaagatctacttcttgaatggaataattgtcaaagtacccatctgccggacctccatacattgtgagatccgctggcacttgtttcacagcagtaaacaaagccgtatcttgctttgtaatcgtaaactcgtgaacatcagaggtaaatccttttttggcggtgagtttcttaatcactttataattctgattgatgatttgataaaaagctccaggttccggatcccccgccgggagattaggatcattagactgagttccagatattgttccttgccacatggtaagaacgggttcccctttgtaggattgtaccctaaagtccgtattttgtgtaaatctactatcaagaggtctaaaccatactgggttaccagcttgatctatgatcaatgcacctgtttgcccaatcatagttgcgccgaacacagtatagggtgcaacgaatattaagccgggtgctgtccctggcttgttgacatttatagaaaccttcataggatgcagggtaggagccgaaacaaagttccattcttgtgagcttgaatgatttgcggatgccttatcaccgcatcccccataaatggcacgcataattccgtatcgggacagaatcccgggttttcatcacataatgatttggcaaaggcaggattttgttggctgaggtttttaaaataacagacaatctcatgattgcgaacaggtaaactgttcagttgaaaagagagcgttaccttcttgtctacatgttgatagagtaatccttgctttgtaaatggaggcggatatgcttgatccggcaaggtgggaataatgtcatggatattgaaaatacgaatactattctttaccgtttggttgaaccgggacgcaaagacagggtcagcgactcgagggctgccataagtatacacaaaaggatttttaaatcgggtattcaccgcaatatcaaaagcggctaacacggctaaagctcctcctaaactatggcctgcgactaataatctttttgctgcataaagcttggttaattccccgatcagctcatttcttgtcgattgataaagacatgtaaatccacgatgggtttttcctgcatttctgacaaacggatatggtacttgatataagtcttggtccgactcattgtccttaaatgttcgggttcctctaaaaattacaatgatctgatcttgtgactcggcaataaaaccaaatacttcagcttccggatcctcaacaccagcaagagctcgtatggtatatcgaaggctatatccttttggcaagacaagcggttccttttcaaagagttgatatgactgatagatcatggccgatagcaatatcgaatcctcacggttaaacatataatataagcttgagtgattcatccgagcagctcctttcttttattcctagcatgttcctcgaaacggagtacacatgtcaggatcgggacaaaaccctggatttttatcgcataatatttcggagaaatcaggattcattttactaaggtatttaaaataacaagcaatcgcatcattgcgcggcgtattattcaattgaagagagattggatactttgtttttacatggtgatagtataatccttcctccgtaaaaggtggtggatacttttttgctgggaaagttggaaacgagtcatgaatatttacaattcgtatactatttttcaccactttgttaaattgggaagcaaagacagggtcaccgatacgcggactgccatacgtatacaagaaaggatgattaaacccagtgttcgcagcaatatctaaagcagctaacgttgccaaagctcctccgtagttgtgcccggtaacaaacagcttttttgacttagaaagtttatttatttgtctgattaaattgtttcttgttgattgataaagacatgtgaatccacgagacgttttcccgccatttttaacatagggatagggaacttgaaatatgtcataggatgctaaaagatccttaggatatgctgcgtatcctctaaacgctataacgatttgatcttgtgactcggcaataaaaccgaatacctcttccataggattctctacgtcagcaaaagcacgaatagtatatcgaagtttaaagccttctggtaaggtaagtttcccttctaaaaagaatggatatgtctgatagctcattgctgcaagaaatattgcggctttgctattaaaaatattgtttttatctaaagaaaccatatatacgcaatccctttcttaatataggtaaatatgatgttaatggtacaatatgaatgaaaacccggaattgctaatgatggtgatatgaacggggatatgggtaaagaaacgtggaagttacttaatgacggaataaaagaaaatgtaaaaagacaaaaagcgccctgttgcaggggcgctttttgattaagatgcatattgaggagatgtatcctcctttactgctttttcttcaggtatatgaatgcatttcgtcatgattgcactcgcaacgtaaaggaccgcaaagatccagacgacgccttgcgcaccgacgagaccgatgaacaaccaagcaagcgcgggaccgacaaacgctgataaacctgcagccaaattcaatacagacatggctgcccctttgtcttttccggccaccgtcggcacaattgccccgatcggcacatagcctgccagcaaacctccccaaataaagccgatcacactgacaaccgctacacttccgccggagaaaaccggtgcataatataataagacagtgaaaatgccgcagccgactccgccgaaccaaataacagtatttttccagccgaatttatcgccgacaataccaaagataagattaaacacaatgttccccagaaaaatcgttccccaaatttgcagccacacattggttgaaattccatgctgggccatgtgcatcggcaaaaagactggaaaaccatatgtaccaatgctgttgatgattctgatgattccgcctgtaaacacgcgcggatttgtaaataaaatcgtaaccccttttaaaagctcctcggctgtttctgatctttttcttttcttcttttcaaaacggtctttattgataaacaatgcaaagaatgcaccgagacatacccagaaaatagagctccaaagcgtattcaaataaccgaacgctttgatcgcgtagcttgagtaccaagcgccgaacacaaacatgccgaggcaatatgctatccaaaaccagccgacagcagtgctcagtttgctttgcggtgttctgtaaatgacccatgtcaagaaagaataagcaaaaagcgggtaacctaacccttttacgaagtaagtcacatacatcactggcaggttcagctgttcaaatccaaatacgataaaagcagctgtaccgatcacataaaacaacagccccataaacatcgttcgttttgcgccaaatgcttcgagacatacacccgaaaaccaggaagctatggcaagcgcaattccgtatatactaaaaatagaagcggactgctgaacggtgagcccgttttcgatcaaaaaaggactgagccagccttgttcaaggccatctcccatcataaacaaaacaacccctaaaaatccccaggcaagccgcttcggtattcctattttatccaacatatctgtctcctccttagatgcttatatccattaccgtattaccttattaaagttgaaaattaaatgattcctcaaaacagcaaaaatgctgccgccttaaatcaatactttgctttctgaacctgaaaaaaagcgctgtgtttgcttccatttctcatataaagccaattctgtctgacagtccttcggttcaatcacccggacatttgctgacatctcctccgttaattgaaaggtttcattgcaaatgactgcagcaccaacgacagatgcctgatgatatccctcttggacatagacctttttttgaagaagatccgcgatatattgagtgagcactttgctttggaatccccctccgcacacccaaacatagtcacgttcaaacggagtaacctctgttaaaatgtcaaagttccatttgattgaaaatgcgatttcttctagcgctgcacgtacaaaatgtgccctctttaaatgtgctgacagcggggcatcaaaaagaaaaccgcctctcgttaatgcattcttttcagccgataaataagagccgagagccgctacacatgcatagtcttcttttgcaagtgcagaaatctcctcctccattacttcgtacgtttcattcggataaaaaatctgttttaatttttgataattcaagccggtaattcccggattcgtttccacaagccaatgcccttgatctgtatgacagttcagccaggctttatgttttgtgtcgccatgatccgcagtaattttggttattggcgttgttgtccctgatacaatgacaatgtcctcaagtccagctccggtgcttttgacagccagctgtgtatccccgccccctgctataaccttagcatttattgaaaggcctaattcggatgcatattcatttgctatcgttccaattgctgttcccgctcttacaagaggcggaaggatagatggagaaaagccgaaaatgtcgcacatctcttctgaccaagtgttttgcttcacatcaaatagcagggtttctgttgcctgtgatggttcatatgttaatattccgctcagttggtacgtcacccaatcactgatgcttgtaaagcttgcagtcttttcccataaagagggctggcgctgttttaatccataaagcttgagcgcagaaaaaagtgcagttggcaggcggcctgtgcggctgtatatctcttcccgatcgggaatgcccgcctcccactctcggccgcgattatcgatgttcggcagcccgagaaaaggattgccgttttgatcaatcaaaacaatcccctgtctttggctcgtcgatgtcaaaccaatgatgtcaatatcacgcgaacgggatagcgcacgttttgccaaattcatcacctgcttccacagcacctgaggagaaaaataacggctgtccgggtaaagcgtctctgtggaatactcgatgtcctcccgttcaactgttagaacactgccagttacactcacgaccgctaccctcgcattgcctgtgccaatatcaaaaacgagatagcctttttgttttttcattctcttagcctcctttcttatacccctgttttcagttcgtccttgttatacattgtcggaatattaagagttttttcacccttccactttttgagggctttattcagtatcgtcacgtgatgatcctccacttcaaatgttgctccagcgagatgcggtgttgccagaacattaggcaatgaaatcaattcataatctgattcctctggaggttcatgataaaaaacgtctaatatcgcacctctgattttatgttcttttaatacagataaaagatcttcacggtttacaacaactgctcttgaagtattgacgaaaatcgcactctgtttcatcagatcaaaatgcttccgatcaataagtccaagtgtttcctcagtacgaggcagatgtacagaaacgatatcactgtctgaaaacaccgttttaagagatactttttcatacagcggatgatcgtcttgaatgtatggatcgtaatactttattttacagtcaaacgcagtcagcagttttgcaatcctttggccaaccgccccgaacccaatcatgccaaccgtttttcctgttaattcatttcctttaaatttgacataagcctgcaggtaatcactgttccactttccatccttcagccattgattcgaggcgctggtatggcgcagaaaggaaatcacatttccaataaacatttcagcaacggcttgtgcattccgccctggtgtataaaaaacaggtatgcctctttttgaggcagctgccacatccacattagagggcattcccctgcaaacaccgacaaatgaaagttcgggaacagaagcaaatacgctgtctgttacctgatcaagttcagtaatcaagcctgtcgcatttgttgcttttagcagctgaatgagttcatcttcccgatatgccctaccttgttccttccaagattgataagtaactgagccaaataagttttcaagctcttttcgtccttcttcgttgtacggtgctgtaaccaaaaccgtcatggtgcaaaacatccttttcattgtatttttcataaaaaaaatctctttccgaagatggaaagagattcatatataggcgcgctctgttacaggcagacgccggtataaaccttgctttcctatctttcaagctgacgcttgctggaattggcacaataatgttgccgaggtttcatagggccagtccctccacctctctggatagaaaatgttgagtatgtaattttcagaataaagaatacgtttatcataaagaagtctcagattgatgtcaatctcttttttcagaattgacgttatgatccgaaatgttataattcttacaaaatatctaactagagagaggaactgggccatgaaatcttttgccacacaacaaaacggcattttcaaatccgtttgctcgctggactgcccggatcagtgcggattgttaatacataaaaaagacgaaaaaatcgtaaaagtgcaaggagaccctgatcatcctgtcacagccggaaacatatgcaacaaagtccggaatatgacggagcgcatctatgatgaaaagcggctgactacaccgctcaaacgaacaggtgctaaaggccaagcgatatttgaaccgatttcctggaaagaggcaatcgatacgatcacctcccgctggaaacagctgattgatgaagagggagctgaaagcatacttccttacagcttttacggaaatatggggaaattgacagctgaaggaatggaccgccgctttttttaccgcatggggtcaagccagcttgaacggacgatttgcagcaaagcgggatctgaaggctataaatatacaatgggcataagcgcgggaatcgatcctgaggaaaccattcatacaaaactatttattttttggggaatcaacgcggtcagcacaaatatgcaccaaattacgatcgcccaaaaagcgcgaaaacaaggtgccaaaattgtcgtgatcgatgtgcataaaaatcaaacaggacgtctcgcagattggtttattccgataaagccgggaaccgacagtgcacttgctcttggcatcatgcacattttatttaaagaaaaccttcatgatgaagcatttctgtctgagtacacggttggctatgaagagctccgtgaacacgtgaaacaatatgatcctaaaaaggtatcgacgatcaccggtgtcagtaccgaagatatttaccgactggcaaaaatgtacggggaaacctccccttcttttatcagaatcggaaacggaccccagcatcacgataacggcgggatgattgtcaggacgattgcctgtcttccggcgatcaccggccaatggctgcacacagggggcggcgcaattaagcataacagcggaattttagaatataatacaaatgccttgcagcggcccgacttattgaaagggcgcaccccgaggtcgtttaatatgaatcagcttggcaaggtgcttttggaaacagacccgccgattcgctctctatttatttacggaacgaaccctgccgtcgtcgcacccgaagcaaacaaagtcagacagggcttgctgcgggaagacttgtttactgtggttcatgatttgtttttaacggaaacggctgcatatgcggacattgtactgcctgcaacatccgcttttgaaaatactgatttttacacctcctactggcaccattacattcagcttcagcagccggtgattgagagatatggggaaagcaagtctaacactgaggtgttccgattactggctgaagccatgggattcacagaccaggagcttaaagattcagatgaagtattaatccgccaggcgcttgaccatccagataatccgcatttggcagagattgattacgatgcactcactaagcattcatttatgaaagcaaaacgcgaaaagccgctgtttccgggcgaacttccaacgccaagcggaaaaatagaattatattcagaaaaaatgaaacaagacggcttcccggctttaccgacatatacacctcttgtaaccgataatgaacatccgtttatgtatgttccggggccaaaccataatttcttaaactcaacattttccaataatgaaaaacacatcaagcttgaaaagacgccaaagctctttatcaacacaaaagatgctgaagaacacggaatcgttgatggggcacctgtacgaatttggaacagccggggagaatgcgagctgaccgctgcagttggagaacaagtgctgccaggtgtcgttgtcagccaaggattatgggcggatgaacaaggaaaaaaacagcttgtaaacgcgctaaccccagacagattgtccgatatgggcggcggcgccacctttttttcaggacgcgtgcagattgaaaaagcataaacgaaaaaaccgcccagaacatgttctggcggtttttttttggttgataatgaaacccggagtatgccaagcccgtataacataacatcgacataatggaggcatgcatatggacgtttttttaggaatcggtattgctttggctggctattttatcggtgaaggcttaaagcagaggaaccaaaccaaaggtaatgaacaaaatgatatcttcctaataaaagaacgggatatttacttttacattggactttttttaggaataacaacgactgaagcaaaacagttagctggagacatggcagacctgccttacatcgaaataaacggaaaaaaatatgtccagaaacatatgttaaaagattggacattcacattagttgaaaaacatcagggtgaataaaacaaatctgaggagagcgagattcattgtcacgacgctctcctctgtttagctgtatggattgaccgccaccaaaactttgttctataagcgctgataaaacgataaaccaccatctatgttctttcctcaaacaactcaagatgcccgttccacaacaatagtttttatattcctttgatgacgtgatgttcttgatgaacgtatgtatcgtaaaacacttagaaaacctattcggtttgaatgtgtgctctcattatgcccccatactgcgcctttatccgcggaggatttttttaaaaaaatatgaaacctaaagcttttagatcctgaatttttattgaacctccatatttctccgattggtaaaaattagcctatacaccggaagctgtacgtttataaaggatcagagaatcccataaccagtaaatcactgcagccgcaatacttaacatataataaaagtacgattgcaatgtccatgctattgacgcaggttcattgataacaaaaaacaggaaagctgcgataaaagcaaccacactgtaaatcaataggtacatgacattgaatgttctcgcttttttctgcaacttcatttggagcggaacagcaaaaaggccatacaccacaaaaccgtataataaagcaattgctgccgtaaacaatgcaattatcatatcgccatacataacgaaagaataaaaccctaataacaaaccaaatgtaaggctggatagccctaatgtcattaaataatatgatgcgatttttttcattttttcaccccccttgtttgatttattcacagtgctgttagtataaattcacaacctttgtattaacaatgcgatgataaaaggtttcaaaaatacgactttttattaaataatacgactggcatgaaaatgcctctcctgattagccaaagcgcgaatgaaaaaaagtgaatgaatacctgatcaacagacaaaataagaagagttgatattcaacacttttcgtaaaggagtgaaaccaatgagtaagaaaggtattcaaaattcaagtattgaacaaataagaaatgaccatgagactgaaacagcttttaaagcagatgatcctaaaaaacacggttccgatcctaaaagaacgaaataagttcttacccccactaaaatatcaataatctggaggaagtaaagtgactcaaaaaaacggtgcagacagacctgatgattataaaagattttcttcattagacaaggaatatgattttcagcaatctatacgcagcaatactgagacagaaagtgtaaacactgaaacacaaactcataacaaagaaaacaaaaatgacacaacagatgttgccgggaaatactttgagccctcagattataaaggaagcacgcaattagaaaaaggattggctgaaactcatgaacaggtgagcgatgactattttgaagggacaatcgatcaaaatttggactagccatacaaacggagctacttaaaagaagtcagttagctccgtttgtagaaacaaccacagtaaaagtagccaacccccaccgaataagatgggggttgcacgtaagtagcctgtttaatagttaaaacgattaatgacggtttgaagttcttccgccaattgggatagagattctgcagcataggagatttcctccattgaatgaagctgctcctgtgaagattttgcaaccgcttctgtatttgctgacgtttcttttgtaccagcagccaatgtatgaactgtgtgctgaatcacttcaacgcctgatgtaagctgttgagttgccgctgcgacttcttgtatttgagaagtgacctgttccacgaggttcagtatttcattgaaatttcctgttgcctcttgagaaagaacaatacctgagctcacattttcttgaacaaccttaatattatttaccgtttctagcgattcattttggatggtcgctaccaccgattggatgtggtttgcagatttatttgtttcatccgccaacttccgaacttcttctgccaccacagcaaatccttttccttgctctccggctctggccgcctcgatcgctgcatttagtgccaacaaatttgtctgctctgaaatcgtcgtgataagcgaagagatatcgctgatttctgctgtgctcgctaccaatgtctgcaatccattgccggctgaatctacagatttatctatgaatttcatctgatctaacatcttgttgacggacttagagcctatttcagccttgtctctcatcgaagaagaaagatccgctatgttccctgtatttgaagcaactgatgatatactgtctaataattcagtgatggattctgcgctcttttctgtcattgagctttgcttcacattgctgtcggcagccatctgcatggctcgggaaatatgttcagatgttgatttcgattcttccgcgcttgccgataattcttcggaggaagcggcgacttgttcagatgagctgctgatctgcttcacaatttgagttaatgaatgagtaaaagaattaaacgattgggcaagctgaccaaattcatctttatttttcacaatgacttttttggttaaatcagcgtcgccatgagcaatttcctctagctgcttatttatgcttcttagtggcaccataatggactttaacagcattatgcttagaacaatgcctaatattactgatatccctgtgacaatgataatgagcgattgactcattttcccattgccctgtatttcatcctttagatcctctacctcttgatccaggcgatcagacagcttattgacagccggatctacgacttcttttcttaatgttctttcttctccaaaatggatggtttctgcttttttaggatttgaagagtaggctgttactacctgctgattcaaagctctatactgagtaaaacttgtcttaatgtcttcaatattggattgatacttctcttcatcaatcaagtcattaacccggtcaaggctctttaagacatcgtctgctttttccttcataccctcgtcgtattctttgtctccggtaatcaagaagcctctttcatcatttgataacccggtcaattcatattggatgtgttttatctctttttggaattccattttgtctttaagttcttcattctttttcacagtagaagaaatcataaatactgaggagcctccaattccaataattgaaacaactaatattgatataatccccagcaattttgttttcactttcatgtgtcgttttccctttccgcacaatgtaatggctgaaataaaatatgttcaagcgcgtttgaatccaattcgcttacgctcatgtccataatatcgacacgtgttatcaagttttatagtgctattttcatatgaataagctaattctttacggctctaaatcttcagaaaggcttcacgaaaaattgactgtcttttgtcgtataagtcactcttattctcattttctattaggcatacaaaaaaggcttttcccacctcaaattggctgaaccggctgttttctcgaaaatataatacaatacgcagcataatatgaaggagcgaaacttaaatggggatcatcaatggtaaagaattcattgaccgattgaataaactagaaaacgaaatatggtatgatggcgaaaaaataaagggtaacatttctgagcatcctgcatttaaaggaataatcaaaacaaaaagctcactttatgaattgcaaacaaaggatgagttaatacatgaaatgacttattgccttcctggagatcataatcgaatcggcctttcctatctccagcctaaaaccaaaaatgatttgaaaaaaagaaggaccatgattgaacattgggctagacatactcatggaatgatggggagaagtccggattacatgaatacggttatgatgagctttgcttcgtcagcggagcttctaaaagataaagagaattgctttcctgaacatatactagatatgtatgaacaagctgctaagcatgacctttcctttacccatacattcattactccgcaagtgaaccggtcacagtcctattttgggctaagtgaaaaaccgatatctgctaaagtcattgatagaaccgaaaaaggtttaatgattcatggcgcacgactgcttgcaacacaaggcgggttgaccgatgaaatcttggttttttcagcgcctaaatttttctttgaaacagatgaagcttatgctttttcaatcccttctaatacaaaaggcgtaaaattcatcacaagagaatcatttgtattaagcgactcttcctttaatcatcccttaagctcaaggtatgaagaaatggattcaattgtggtttttgatcatgtgttagtgccgtggaatcgtgtgtttttttacgataatgtggaagcagctaaagattttatgacaaaaagctcttttcatgcctttacctttcaccaggttgtcattaggcaaatgataaaaattgaatttctattaggtgttgcacagcttcttgtcgacaccattaatgtttccgaatatcagcacatccaagaaaagctctcagaaatcattgtgggattggaaacaatcaaagccctcattgacaaatcggaaaatgatgctcagttagatgaattcggctatatgcgcccctgtttaattcctcttcaagtcatcagtacgatcattcctaagctatatcctcgatttactgaaatcatacaattaattggagctagcggaatggtgacactgcctaccgaaaatgcatttgactcagagatacgggaagatcttgaccaatatcttcaagcaaccaatacaaatgctgaagaacgtgtgaaaattttccgtttggcatgggatttaacaatgagttcattcggaactagacaaactcactacgaaagatattttttcggagatcctattcggatttcaagcaggctgtataccagttatccaaagcaggagcagttgaacatgattaaaacatttttacatgcagatacagaacattgaaaaaacagcgggaaaagatccgctgtttcgtattttttattcaggaaactgaacatggcccggtactgtataggctttggacgttccgctttcaggcagctttggaatggtgtctttcacaacttttccgcggatgtcagtcattctgactttgagagagccagtacctaaattcgtactcacaaaatggttatagtccattttctccatgttgatccacttaccatccttttcatattccattttcataacaggatacttgtgatttctgacttggattgctgcccaccacctgctgctgccttctttgatccggtacgtgaaattgccggtgattggggctttgacaacacgccatttaatattgatttttccgtctttcatattgccgattttacggaaggcattaggtgacagatcaagagctccccgagcgccttcgggataaagatcagtaacatatacggttgttttcccttttggcccttcaacttccaaataagagccggcaagtgccgcttttactcctccgtaattgagatccgccggatttattgcagtaatctccatatcggaaggaatgggatccagcaggaaagctcctcctgaataacctgaccctgtatacgttgcataaccttcatgcaggtcgtcatatgctgccgaagcttgcggggaaaaacagaagatcgtcaacaaaaccataccaacaaatgcactcatgatctttttcatatttggtcctcctcaaaccagactccaaatgagaatcattatcattataagactcaatccatctggtttgaaagaggaaatagattcatagttgattttaaggcaaattcactatcattcatatatcaaatgtaggtacttatgaaaaagccaatacaaatgaacgaatgtgcacttcagccgaatgtcttatttttccctctcaaaattcgcatttcaataacgaaatgaaacaggctgttggcctgataacagctatacaggaaaagctatttttccccgctcagtttcaacttagctgtcatcatgatgccaaagatcagcacaatcggaacccaaataatgaagtgataaaaatcaggctcagccagagcaacaataatagcccctacacaatacaaaataatagccagtgctcttaacacagtatctcttaagaaagtcttcttttgcttcttaaaaaacaaacggccggatatatcctctaaaagagaagccaaagtgccggtcaacacagttgaagaaatacctgcaatccccagtttttttgctgctgtagtttgaatccccatagaaatgctcatgagtataattagaatgtgcacaggaacaaatgcccggtaaaaagaaagacaagcaaagacaaacaaaatgaatgcttcaagtgcgagggcttttgtcacagcagaaggccaaagggtattttccgcctttccgaccatcaatgtagcaatgatcacgccgcatataaatccgattagcgcagtcaaggaattaaaaacagtgacttgaatggatttgccgatagctaaccccaataatacaatgtttccagtcatattagctgtgaacacatgtcccaggcttaaatacccgattacatccacgattccagctgttaaacataaaagtgatagcaaggtgtttcgataagctgctgcagtcaacggtgtatcaatcctttcttctatttcaattgttagtatgtcttttggcgcaatctctattttttaagtaacccaacattaattaggaagatagaacctatcattcctttccattaactgtaataataatccccgcaaggaaatgattaaaattgaaaggaagcatattgtgatgaaacgactttgtttatggttcaccgtctttagcttgtttttggttctcttgcctggaaaagcattaggtgcagtcgattttccgaatacctcaacaaatggccttttaggttttgccggaaatgccaaaaatgaaaaaggcatctctaaaacgggcacaacgggtggaaaaaacgggcagattgtttacattcaaagcgtaaatgatttaaaaacccatctaggaggatccactccgaaaattttagtgcttcaaaatgatctttccgcatctgcgaaaacaacagttaccattggctcaaataaaacactcgtgggctcttacgcgaaaaaaacgctgaaaaatatttatttaacaacttcatcagcttctggaaatgtcatttttcaaaatttaacgtttgaacacagtccgcagattaacggaaataatgatatccagctttatttagattccggtatgaactattggattgatcacgtcacattctcaggtcatagctataatgcaagcggaagcgatttggacaaactcgtgtatatcggaaaatccgcagattatatcacgatcagcaactcaaaatttgcgaatcataaatacggtttgattttaggatacccggatgattctcagcatcaatatgacggctacccccacatgacaatcgccaataattattttgagaacttgtatgttagaggcccaggtctgatgagatacggttactttcatgttaaaaacaattacagcaataattttaaccaggcgattacaattgctacaaaagcaaaaatatattccgaatataattactttgggaaaggcagtgaaaaaggcggcatccttgacgacaagggcactggttatttcaaagacataggcagctatccatcactcaacaagcaaacctctccgctgacttcttggaatcccgggtcaaactatagctatcgtgtccaaacgccggaatatacaaaagaatttgtcacgaaatatgccggatcacaaagtacaactctggtatttggctactgatataaaagaggccctgcgttaaaaacgctgtgcctctttttatacttataggctatttttaagcgatccttgtaactccatcaagatccagcgtcggtcaaaccaaaaagcatatgtttttttccgcaataacttcttaaatggctttcttattataccagtttatcgcaagtaaaaagaaatcattgttctggtcctgtattaaatcaacgttcgtcccacacactattcaaaaacccctaaaaaggatgatggatatgtgcggcaggtttactttgtactctgcatttgatgatattattgaccagtttgacatcgatcaattttttcctaaaggtgaataccagccaagctataatgtcgcaccatcacaaaacatccttgcaatcatcaatgatggatcaaataatcgcttaggcaagcttagatggggacttattccaccttgggcaaaagatgaaaagatcggttataaaatgattaatgctcgagccgaaaccattaccgagaaaccggcctttcgaagaccgcttgtcagcaaacgctgcatcataccagcagacagtttttatgaatggaaacggcttgattccaaaaccaaaatcccaatgcggatcaaattgaaatcatctgctctttttgcgtttgctggcttatatgaaaagtggagcacacatcaaggataccctctttatacctgcaccatcataacaactgagcctaatgagttcatgaaagatatacacgaccgaatgccggttatattggcccatgatcatgaaaaggagtggcttaacccccaaaatacaagccctgattatctgcaaagtttgctgctgccttatgatgctgatgacatggaagcataccaggtttcatcattagtaaattcacctaaaaataattcagctgagcttcttgatgcagaaaatcatatgtagtgattgaaattctctagcaagaacttgtcaatagctttgttccttaggtgccaatccctctagtaattatgaatatttagtacatagatcaattagttttcgatatcagttcgaaataattttattatgtaaacttaaataagcaatgttatccctttcatataaaatagtttacatttttataaagtcgcttcacctttctattttgtcagcaaaaaaactgaaccacattaaacttatgaaacctgccgcacctgtgattgcaaatatgatataagcccatagaggtaaatccatacactttccatcctaagaattaaatgaaatttctttcatcttacatgaaggtcttctttcttttgtttatccagtgtaatacttaataatatgttgatgaatgcagctggaaaatatataaatcccactccaagaatgcctagtatcgtacttaaacttactatgtaattctttgtcatcgtttgactgtcaatcaatattagaagtgaaatcaatccagctaaaacacctataaaccaagcatcgccaacagcataagaatcatccagcatccctaaacatcgccccaatatagagctcccaatggcagtcaaactggataaaaatatgagtgctttcatttcttctcctcctttaaagccaatcaaactggtagaaatcggccattgaattcccattatcgaatggttatcatttccacattaacattttaaagctcattacaatacgattcaagcagaaaaaccctacataacgtatatatagggatttaataaaacacaggccaaaattcagctctatctactttaaaaagatatgaagggcagctgtgtgatctgttacgtctttacgtaccgagatatttcacaacaggcactttcttcttgcgcagagaatcaagcatgactgatccagcattcaagttgctttgtactaattctttaggcgtcaatgccatccactgattgagtgacacatctgcatagcggttacttttgaacatttctaaaaaccataatgtttctgtaccagtgttttgtatatagtgtccggcattagaaggcacgtatccaacgtcgcctgctctataatcaaatgtgcgggcagtcccatttccgataaataccgtcattcgtccctgtcctgttagataatattgccactcatcgctattgggatgccaatgaagctctctcatcgcgccaggctcaatctgaacaagtgcagcggctatcgtttttgaaattgggaagttagaagaatccacaattcgtacactcccccctggcatttgaattgggggttgatttaacagctcgtgtttaaaggtcatggggacttttccatatggtgactgaatgtcttcactggcgactgatcccggcacattcccttggtagatatagacttgctcagacggaagagagttgaaagcattctccgggacaccgaaatttgcagacagaacatcttttggtgtgtgtgcaagccaatctgaaatggttaacgttgaaaactcagaaaagttcccatcatcgaaaacgagcagaaactcgcagtgttccaatccctgtatggaatgcggaattcctgccgggaagtaccaaaggtcgccgggaccaacatcagcaatgaaatttcgtccgtcttggtcaacagcggtgatacgtgcccgtcccaaaagcatataagcccactccgcttgcttatgccaatgaagctcgcggacgcctcccgcagttaagctcatgtttacacctgcaatcgcagtcgaaatcggaagctgtcttacggtgatttctcttgaccagccgccgtgatctaatttcatgggagcgtctgagaatgaaaatctcaagttaggaatcataccctcatctgtaacaggcggaacaaatatattcggattttgaatatcccgtattatatttcgcgggcctgtatcaatagctccagctccatcacttcgaataggctgcggcacgtttctgtcttcatgattgattggttgttgttccaacagcatgcacctcgttttagaaatgaacaagattttatttcagcctatgcagaatcttagattgctgtgcctaggaatccgcaaataaaaaagtgaccaccaatgtgatcacaaatacatcaaataaactattttttataccatggcttcttatgtaatttgattgcttctgtctgttttttctggcctgtcctccactccacttttactaatacatcatgtcctatcacttcatcttcaggcatataatcaaaggtggaaatatggtcctccatgcgtcccccacccggcatttcatcacctgtgtactctgataagtcgtactcatctacgttatcatcttgatacttttcgccatctacatacagagtaattctttcaacaacagtccacttttcttccttcttactcccctgccaatatagatttagaaaataattgggtccaattgaagttttgtctgatttttcaaggttagacatccacagtccgcttttcccgctgccctcatatttcactttgtttcctgacaccattacaaataatgtgatgatgcagatgatcaagaatccagcaatgatcaatagccatttcttaatattgttcttttttctcatgtttttcctcactttcctaactttttagtaggaaaatacgatcaaaatgttaccgaaaagaaaataaaaaagggctaatgatctaacagatgactgtctaaacttttgacttaaattaaagtgctctctaaagacaagattaaaacgtataacagctcttaaatgcattttttgtttcattgagtcaagaaccttaaaatggctttttattattaaaaatcaagctagtgtattaagtaacttttcaaatttatttatactcatgatctcgtgagtcacaaatcttccatcaaaaaaaacgctaaaagttgtccaaatagctggtgacttttgtgcctcttctttcgatgataactgaattgactgaaattgaacccctttcttttcagtcaattcccgcaaatcatttatcatgcccactgcaaacggacactgagctgtatagtatatcgtaatccccttttcattgatagaatcacttttcacctggctcttaaatgcaggagaagctgcaaggccattccaagtcaaagccattaattgaaaataaggggcagcttcatcttgtagagtaaaccccatatgctcaaagaaatgcttatcacttaaatagggcagttttttcttgcctgcgatatggataatgccatccatgccgcacgctttcgcatctgctatacatttgtccaacaatcgtttcgcatgaccgttatttttatatctgccagacacccacagacaattaatgtacataaaattaggcgcattgataggcacccatgcctcattcgcaggtaggtattcaataaagacttttgcccgttcatgtaagcgatagaacaccaatccttcatccattcgagctttgagccatctcttcttttcattaactgcatgctcatattgtttcgtgcctaatgcacagcaaatatgattgtcttcaatattgtcctttgtgatttcaatgtagcacatctcctcttttccccctttaacataattacatggaattcaacttcacactttacatgcctaatagaataaatacccgttccaacttaaatactttttcttttccattttgtcaattaactgtaaaactcttcttttattcagatattatcttgattcctatatcacccatttcaaatccaaagtgtgttcatctttgaggattagatgcactgcttatgctataaatacagtacacgaagttttttatttgaagtaatatttgttacgggacagcaatagtaaataagtgataaaaggggaattaaacttggtggaaaaatgttattcttgtttaatttgcagatacaaaggattatttcaaaatcctttgtataaaggcgattatcaaaaaacgtttgacatttgtccatgttgcggttttgaatttggctacagtgaggatcatgatgtgaggttaggttttattgtaactcctgatcatttaattgaggctgcatttcaattgtatcgcaaacaatggattgagagcgggatggtaattgctcatccggaagatattccagaagaattgaaaaatggcaattgcttaaaatttgaagttttgttgaaacaattgaaaaaactaaatcttgacatagaaaattttgaaattagcggtttttaatgatgaaacaggttgcacttgtttaggtttcactgtcattatcagtaaaatgttaagttgaaatgcgcagtcagtcacaaagtctctattcgtattcaataaagactttgtgatcatcgacaaacatttcactcccatcggataaagtatccaaaaggcctcctctggttcttctctatagtcattaatcacagtcactttgacatttgactcagctatgattggttttccaacaatttttcgttttttcctcaggcaaagtaagagatcgaatcatcaaagccattccatctttactgtctaattaatgccatcttcagtgaatttaaaggtctgttttaaattgcgtccttcttgccccttctgtgtccaaattataacaacctctaattcagaggccttatctgccagcataaaatgattgaacttcagcggtgagccatcatttaaactttcagctaacattttagaatcttcttttggtttgacacaattttcatcgggacatccaaaaagcgaaaaccttgtgattgaattagggtcatttctatacaattgcacatccactgtagctgctttttcccctatatttttgacttccaaggaatatacttgatattctcctttttgaggtctcgtaaattcctttacattttttgcttcacttacttttactgaccactgttctgttttttgtgtaataggcaacaccgtaaaagtcagggcatgcgcttttgattggcaaaacgtaaatccaactgctgtaaaaacaattacagaaaataatacccttttcacttcatttatccctccttcctttcactggccgctccttaaagaattgattttgagcaatctacaagctctcttaaccaaaaccttacctgaggttttgtctttactgctctgcatttatttctttcggtatccgagaaggagctttggggatttttctcaatctgctgttaatcacatcagaagagtatagcgtaataatcatacttctcccatacctttttgcccgaattaagattggttggttatattggttttgaaagcgaaagtcaggacctccccagcttaccgtcgcatcccgtccgggcggtacatatggtacacttctagtatgagaatagcgctgaacgatctgcagtcctgcacgatctactgcattaaatagagttgaggacacctgacaaattcctcctcctacaccttcagacaactctccttttacaataatgggtgcacttttatatcctttgttccgagttctcattcccacaacttggttaaacgaaaacgtctcattagggaaaacaacgtgattgtcgattgcttttgcagaaagagaaatattgtgtgaacggcttttattgcttgagttaaaatacgtcacgtactgaccaagctgctgcgtactgatgtgagctagcagctcgctgtcaactttcggataaatgttcatttccggcacttctatcttggagggaccttgcccataaaaatacgcataaaacttttccataaacgcctgttgatacagtttgtagccaaccctgcccgggacgatgcttccatgatcgttaaggacagcatttatcggctcacggtacactttctgatcaagctgtttgatgaatttactgtatttttcatagtcaaccattggagtgccgggaagaggcattgtaaagtcttcacggttaacagtggcaatcgtccgtccttgctgtgtgaccgttaaactgtcctgcggctcactcggctgagccaataaaaaaagaccagtgatcaaaatttgtatcataagtcggtttacctcccaatcattagtatgaacagccgcttatcctttgatgtatttcttcccatcgtttgtttgaatctttagacgttgataaaaaccttcataaaagagcttagctttatgttcacaccgatccctgagctcactgaggcacacggttcattcagtcggcaagtttgaagtagttcagcatctcccagtgatgagggatgcttttttgtcttgtcaaaaatgaaaagggtctcctataacaacaaaaaatcaatccatttcaatatttttttattgagaaacgataaattttttgttacattcaattagacaacaaataaatgaggtgcttgttatgaatcgaatgtcgacaatttttttaaagatagctttggttcttattggaattccaattcttgctttatgcatttttttagtgcctaaggtagccaactattcagcagaattatttccaaatatcgcttatataaaatatctcgttttcatctatttgtatgtaacggcgatacctttttactttgctctttatcaagcgttcaaacttttaagctatattgacaaaaacaaagctttctcgggtttgtctgtaagagctttgaagaatataaaatattgcgcagtcactatcagtatcttttacgcagcaggcatgcctgtcttttatctgatggccgagatagacgacgccccgggtatcattgtgatcggattggttattatttttgcttcaatggtgattgcggtctttgctgctgttcttcaaaaactgttaaaagaagcgattgatataaaatcagaaaatgacttaacggtctgaggtgatgacatggcgattattatcaacattgatgtgatgcttgctaagaggaaaatgagcgtaacagagctttcagagagagttggcatcaccatggctaatctttcgatattaaaaaacggaaaagcaaaggctattcgattatcaactttagaagcgatttgcaaggctttagaatgtcagcccggggatatattggaataccgaagtgatgaagacacaggattcgtaaagaaaaaatatgaaggatcaacagaaaaataaagtgattggcggtgagcttatggacataaacttatatccatctagctgctatactaagcgtccctttcatacacgaagaacacaactatggaggaggcatacatcatgagagccataaaacaaatcgttcattttggctgggaacaagccctttcatgtttgtttcctgccgttatttttgcctctttggctattacgcaaatcatcccactgcccttcttgccgcggtatgactggctgctcattatctgcgttctcatgcaattgtggatggtgcgttccggtcttgagacacgggatgaattaaaagtgatcacattattccaccttattgggcttgctctggaactttttaaagtccatatgggctcctggtcttatccagaagaaggatactccaaaatatttggagtacctttgtatagcggctttatgtacgcaagtgtagccagttatttgtgccaggcatggagaaggcttaatgttgaactggttaagtggccgcctttttttgcagttgttccgcttgccacagcgatttatttgaattttttcacccaccatttttctatagactttcgatggtggttatctgggcttgtcatcattgtcttttggcaaacatgggttacatacgaggtgaatggagctcgttaccgtatgccgctcgcactttcttttgtactcatcggattttttatatggatagcggaaaatatcgctacgttttttggagcttggaaatatccaaaccaaatcgatacatggagtctcgtacaccttggaaaggtaagttcatggctcttgctagtgattgttagctttcttatagtagcatcattaaaacaagttaaggagcagagtcccacaaaggcagagatggatgaatctttttcttagcatacaaggtcccaaatagagtgaaaagcaacgttcaaatggttgcttttttcttttatgtaactctgccggtgagtattcatcttcttcaaatttcatcgcaccacgataactgattcagattacaactgctttcaacacattgataaactcatgcgccgccggcgttatctcttcaaatgaatgtacgatgacgccaatatcgcgtgtgaccctaggaaagatgtcctttttaatcaattgatgcgggacggatgaaagtgtaaagtttgaaatgatgccgatacccaagttatttttgaccatattaatcaaggtttcggcattttgcacagttaagttttcctttaattcgatgttgtattgcgaaaatgcgtttgacatcgcgatttcatgaccgcctttacaaaaaatgaggtcatcttgatatgtttcaaggtcgacatgcttttcaagttttaattcgtcacgctgcggcgggatgacggccaccatatagtcgttacacaatagctgattttcaaacggttcaaatggagatgctgcgattccgatatcaaccgtccgatcctcaacccatccttttatttggtcagaggttccttcgatcaattctatgcggatcagcgggtagtttgatctgaatgcagcaatcgcctgtggcatgatatttgttgaaactgcaggaaatgaaccgattttcaccttcccgtttaacagcttgttttcccggttggctacttgatatattttgctttcaattcccttcatttgcctcgcaagcagcaatatttcttttccgatgtcagtcagcattaaaccatgatgtttatccctgatcaataatttgagctgcagtgagctctccaggttttttatcgctttgcttaccgccggctgagagatgaacaattcttttgccgcttctgtaatattcaatttctccccgacttttacaaatatgtgaagatggttcatattcataaccatttggttatacccccaataataaaaatgtatttcagttatacataaatgtaacatatgatagaaaccagcacgatatttaaacaagaaaggcggcttcattatggtaaaagttatgctgggaatcatatctgtcacacttatttggggttatacttgggttgcgatgaaagtaggaattcatgacatccccccgcttttattttcgggtttgcgcctgttcatcggagcagttcctttatttctcattctcttcatccaaagaaaaaagctttcaataaaaaaagaacatctcaaaagctatatcatcatgagcctgttgatggggctgggctatatggggattttgacgtatggaatgcagtttgtcgattcagggaaaacctctgttttggtatatacaatgcctatatttgttacggtgatcagccatttttcattaaacgagaaaatgaatgtgtatagaacgatgggactggtctgtggcctcttcggactgttatttatatttggaaaggaaatgctcaatatcgaacaaagcgctttatttggggagctgtgcgtacttgcggcagcgcttagctggggaatcgcgaatgtgttcagcaagctacaattcaagcatatcgatattattcacatgaatgcctggcaccttatgatgggagccgtcatgttattggtgttttcctttatatttgagccggtcccttcagccgagtggacatatcaggcggtgtggtcattgctgtttaatggcttgctttccaccggctttacctttgtcgtatggttttgggtgctcaatcaaatccaagcgtcaaaagcatccatggcattaatgtttgttcccgtattagccctattctttggatggctgcaattgcacgaacagatcaccatcaatattatcctcggcgcactgctgatatgctgcgggatttttatgaatacatttacattttcacgacggaaagtgtgaatgatatacatttcccctgtcatttgggcttcatgtgacaggagacgactattacgagaaagtcttctagaatcctgacgacagcctattaaacaatgaaaaaagctaatgtctgcatgtagacattagcttggctggcgtttaggctggtgagaatccagatacttttttattaccattctggctgatcaaactgaaaaccgtatagaccttttactttaacatctccgcaatctggatcttttgtcaaaatcaaataatgagtcttataaggcatcgtctcaactcgatcagttgcactcaaatcaaaatgatcccctgagaagtttttttcactaacggttatttcatatcctgacaaagtcattcgcatgattcttgcgttaattgtacatccttcagtatcgaaaatggtgaatctgtacccaaagtgagatgtccaatggtttgaatttaggtcatcagacttcataaaccatttttcattttctgtcattgtaaaactcactttctcctcatctttcacgataacagccgaagcttcccctacatggatagtcaaagccaaaagaaatgtaaaagctaacatcaacatctttttcaaaagagttcctcccgatatctttttacttcaatttattggaagggtcttttctgatcaagacagtcttctccaaatgaatctttagcatcatgaaatgagccttaataagaacagttttaacccaaatcaaactctattcgaaataaggcttaccaatctatattctttttaaaagtttctgcatttctttatatagctcctagacacatataaaaaatgctcccataagttcaggagcactacaaaaaactgctaaagtgttttctatcgatttattgtattcattagctcaaagaagtattcaggcttataagtcttattcagcttataccatgaacgcaatgtatctggtgcaaatacttctaattttttcaatacttctaccgcaaattccagaggagcaattcctgatgcagtaaccaaattttcatcagatactgcaggttccttttcatatagtgtttctcctttgtaattagggcagaccattttcatatactctaggtcattgcttgtgtgctttctcgaatttaagtatccttcattcgcgaggcccaaggttgcaccacaaatcgcagcaatagtcgtgccaagctttaaagcgtcgccaacttttttcaagatcggctgatgaatatcttctccccaagtgtttcctccgggtaaaatgataagatcttgactctcaagagtacactcatcaagagaaatatctggttttatgcttaatccgcccaacgtagttatcatttctttattagcccctactgtaactacttttaaagatgctgcatcctgtttaaaatatctccctgagtttagttcagcaattaaatatccatattcccagtctgacattgtgtgaaatacgtagagataaacttttctcgtttgcatccaataacactccaatcacaattgataaagctttctaatagatgactttgctgacagccattgtcagcatatgtattctgatttgcctattcttatataataccatgtaggtgggcaattgcccttgttctcccaacttattaaaaatataagataaattgattctatgtttactagcgcaaaggggtttgttacactaactgtcatgggaaacatttcaaaggtaatataaaatcatttgaatgaggaggcctgatgaagttgaaaaataaagcgtcaataaaattcggaatatgtgttgggcttttatgtttaagcattactggtttcacacctttttacagctcaacacatgccgaagcaaaatccatagaagacacaaacatggcaagctgtataacgaataaaaaatttgttcaacttgagaaaaaatttgatgccaggcttggtgtttatgccattgatacaggttcaaacaagacaatcgcctatcggtcgaatgagcgatttgcttacgcatcaacctataaagttctagccgcagctgctgtcctgaagaaaaactcaattgaaaaacttaatgaagtcatccactacagcaaggacgatcttgttacatattctccaatcacagagaaacacctagatacaggcatgagcctaaatgaaatctcggaagcggctatccgttacagcgataataccgctgggaacatcttgttgcaacagcttggcggccctaaaggttttgaaaagtcactgaaacagattggggatcatgtaacgaaagctaaacgattcgagacggatctaaactctgcgattcctggtgatattcgtgacaccagcaccgcaaaagcactagcaaccgatcttaaagctttcactttagataacacgctcacgactgacaaacgcacgatcttaaccgattggatgcgaggcaatgctactggtgacgaactgattcgggcaggcgctccaataggatgggaagtcggcgataaatctggagccggaagttacgggacacgaaacgacattgctatcgtttggccgcctaacagagctcctattgttttggcaattctgtcaaaccgctttacgaaagatactaattatgataatgctcttatcgctgaggctgcaaaagtcgtccttaacgatctcaaataatatgtttagccttttgccacaaaggaaaagacattacttttttaactcctaccgttcattttttgatgaacggttctttcataagacctctagaatcatatatttaaacaccacaaaattaaacgttattatatttaacggcaagttttcattttatggaacaagtaaagtttgaatctgacaagaattaaggctaagcaccctaaaatccgttttctttccttccaagaatatactccttagtgcaagccattataaagaagtgaacatacaatgcagacaactcccttaagtctcttattctgtgaccaatttgtaatactcatgaatatccggactcacttccaatatttcgtctcgaagacactaacatatcaaaccacttgaattaacataactgaacttgatattggtcactggcagtttcaatgcaatagaacaacatttgttgactcagaggttatctatatgagaattcaacaatttttttataataattcatatttttgtatcgttgcacttggtggatttgactcttttaatgtatggaaccacacttttattttttcacctcttttgagatcatctgtgttatcaatctcacttaatcctacaattactatgttatttttaaacttgttcataagttgtccttcagaaagatcgtaatcttcttttactggagcttttgtatcggtaatgagaattgccctttcattgtctttaagcacgacatagcctactaggctctgcatctttgtttcttctccgtgttgttcatttttgcagcctgcaaggaaaataatgagcactatcaagcttactccgattttaggcaactttctccctcccgtaatgttaaacaatctcactccataactacatatcaataaactgtagtgtaaatctatccagaaacttcttcattttctcatattgaatcttttacaagctgttaatacacagactaaatcgggtaaaaattcgtagaggtgatttctttgaatgatgatcattaagtaactcattactcttcatttattttttcaacaatcatggtattggcggtcgccatctttccacaatacacttcttggtttgtaacagttttcttcttgagttttgcacttatctatacattccaaatacatcaaacaagttcttcaaaagcaatatcttatatttcgtattttttattcattgtttcattgacttacactttagttaatatgtaatagtaatcctccctttgtgggaggattatttgtttaagcttatttctaggctgcttttgggccacctctatctataatgataaaactatctgaaccatttttttcttccgatctttgtcttcgtaaatagcaacattttggcgtgtcattaatgtaataccggccattttaaactctttttgatctttaaaataaacaacagggacattcaccaaacggatctacttctttttgttctttctcaaatgtttgtatgtggttgtcttcgaaccatacccttactcttattccgctaaaatcgagatttttactttttatgatccattattctctttcaaaataacttccaactacaacataatatatgtataaattgtaaatggagttgatgtaattgaagattaggaaaatcttattgagttctgctttatcctttggcatgctcatatccacggttcccgcattggctgctggcacttcgtctgaggttgcagtaaaaagtggtgaatatgattatgacactatataccgcattagtcctcttccaatggacttccagccaacaatagaatacaacggttatacttatacgcttacacgacattattttgattactcaatcgggttttacacggctatttatacaaaagttgtttaaatttataaaggagctttttagctcctttttctcttgttttaagcacaaatacaagtttaaatgctggtaataaaaaattcactttaaagaagcgccgcccgcaaaatgcggcttttgcacactacgccaattttatatagaaaagccagacctcctccaagaggttccagcttttcttaatgtgctatcgatcttcgttagttcaacgggaacttaatcattcggtacaaatgcagcctcccacttctagttagggctgatggcggaatatctgatggctctctacacatcagacattataagatttcaatgtagccttctgtaccatgaacgcgaattcgttgcccatcttttatcagcttggcagcattttcaacgccaacaactgcaggtaagccatattcacgggctataacagctccatgggtcatcagtcccccaacttcggtgactaggccttttatggatacaaacaatggtgtccagcttggatcggtaaaggaggtaactaatatatctccatcttctaaatcagcatcttccatgtttaaaatgacacgcgctcgcccctctatcactccggaggaaacaggtagacctacaatcgctccggctgggagattttctcgtttatactcacctgtaacgatttcaccatcagacgtgataacacgtggtggagatagtttttcatataatgtgtactcggcttttcgtgcgctgatgatttgataatccagtttatgtgtgcgtacgacttcgtgaagttcttcaaaagtgagatagtatatatcttctttttcatgaataacgcccgcttctatgagttgttcggcttctttcagtaaagcctgcttataaacgaagtaccgattaaccatgccgtattttggatattccctaaacccgctgaaattccggatgatatctatcattcgttttgtttctttggctttttgttcaccatccggtaattgcttcaatcgatctaataactcttgttctttcttcaaagcttcctgtcgcccttgctcaaatttccgatggctggcattaggctcactgttattgatattattaagaatcattgggataagtgtagttggtttttcgctccatcgagttcttgtaatatcaatttctccggtacatcgcattccgtatttgctgagataatcatagatcgcgtctcgggttttgcttccgccatcaaacttagccagttcatccaaaaaattatcatcttttacatgttgtaagtaatcaattacctctggataaggacgaatcacatctgcgacgtctaatagcgcaagacccatttctgaagtaatattatggggtacagattgagaaagcgtatctgctgcgtttttttcacctaaccactcgttcattttttcgttaatccataatgaagcattcatagcagttcgaatcacaacagaactttctgagttaaataaaatcttctttaattcctggatatcttccagaataaaacgaaataaatctgatcctgatttcgtttggatgttttgttttaactcttctatcgatgtttgactgctctcaatcaaatcagacacgattgtcggatcgttttcaacttgagccggcatatctgcattgcctctgctgggatttggtgctgttttatcatttggtatcgactttatgaaatctcgtcgccttattatggtcataagtgcgtcttttaagagctgatcgtgctgccccatgccttttaagaaaacttctctgctgtcaggggatgccagatgatgtgtgacatcaacaaatagccttccaccggctttacgcatgggtgcagcagtcgtcaacagaaaaaaagacaatcctagtggttttatgggatccgtcatcatttgttgatgaccaacagaaatatagacgtgattttcttggtcactcgcttcagggatggggaataaagtagtgattggacgactctgtacaatataaaaagtatcgcgggccaaacaccattcgatatcttgcggctggccgaaatgagcttcgatctgtcttccaatgcgttccagctgtaaaatttgttcatcagtcagtgtttgagccttttgctgatcagaatcgatctgatgtgtttctgttccgccttcttttcgtccgtagatagccaattttttagttgctattctcttatcgatgatttgcccatcctgtactttataacaatcggcagataccaatccggaaaccagtgcttcaccaagtccaaaaccggcatctatggataacacctttcggttggaggtaatcggatcagcggtaaataaaatccctgaagcctgaggaaaaaccatcctttgaacgataacggataaataaacttggctgtggccaaatccattttgcatacggtaaataaccgcgcgatccgtaaatagggacgcccagcatttactgatatgctgcaagattgcatcgacgccgataatatttaaataggtgtcttgttgaccggcaaaagaagcatgtggtaaatcttcagcagttgcactagaacgcacggcataggcatgttcctcgccgaactgggagagatagtgagccactgctttcacaacatcggaaggaatgtctacttccataatgatttgccgaatcttccggctgatgttaccaatctgatctcggtcctcaacttttagcatcgccaactgatccaacaacacttgtaacgtttcgttttgttcgatggcttttagatatcctactgttgtgacacaaaatccttctggtacttgtataccttgaatttttgataattcccctaaatgtaacccttttcctccaacgagcgaaaactgtgttttttcaatttcatgtaaaccgagaaccaaagaactcattctacatctccccttcaaaaaaatattgacaagagcttcctagcaggatataataaaattataagatggatatctataaccttttaaccagaaagcgcacgtagtgtgattatatcaccgtgtctgtttttgtgcaatataaaaagaacctgggcaatttcaccaggttctttcttaatttacataactagtcacattaaaaaacttggttcgatctgatacaatcctctaagggtatcctaaagttgggttcttttcgaactagtctgtcttgttccgtagagtccccatttatgaattagactttttgttcttaacagtcccaccgttaactagtataaagttatgaggatctggttaactactgagatatttttattttgagtaaggcttatgtttgataaagaagggttatgtaaaggtgtctgttgtgagcaagcgctgactacaaaaaattgatagcattctcatttaaataccattctattaacctatagaaaaagttataaaaccagatggagaatatcctacctccagtaattccaaggccgttcacctagtagaaaacaacctttaaccattactaacgattttaataatcattgattataaaacttctcaaggaacgatcatcagcccgttagctacccctgattaaagatgatctgctaccacactgttacgttagaacttccactactttgatatccttctgtcgccatgacttggtaagcccaattactgcccagattcattccatggctcttccatgcgttcacatgattgctgaaagtgattgtagcgttgcttccggttggtctcttcgtctgacgaacactccagtactgcgtaaaagtagtgcgatcgccatcaatggaaggtgcgttataacgtgtagttgtatatatgtcatatgtacccccatcactttttacagtacctttatacgttccggtaggcctataagtaccccatgaatccaccacataatattctatgaggggcgatctcgtccaaccatataaagttaaatatccattgccattcggtgcccaaactccggcattatagtttatcgtcctaaatggcgaacctgtagtccaacctttaccaacaacaaaatttccggtattagaccaattaacactgtaattcccgccagacccattgacagcgtttactataccgcccccatcagtccaattttgccagtagtctgtgctagctgcagaggcggttgccgaaaacaagctaatactcattaaagctgccgataatccaactaagaaattctttttaaacttaaacatatgttacctcctataatattttttccgactttgaggtagcactcgtatacatttaaaacattcttaattactaacgccaatgcttttgatcgtccccttcagtataataacacgaattcacgagtgaatattaaaagtatttgtaatttaattacaaatacctagaaacacattataagtggtcttcttccaccatatcctgatccttttttcgtaggatcacaattcttgtttctaattcagatggagtaatatctgcaatgaattcccattgaaccatttcaaataaaggagatacacattagagattgtgaaattattgtagctgccgcttgtctaatgaagggaagcaaatttatgaagaatatgaagaactgaagaagaaaacaattaaggttatactaagaaagaactgctcaattagaattattgaccaaaaatttgaggatgatagcttagatcagttttacaaagaagttgcaagatttttatttgaaaggactctgaaaaagaaaaaaagaattgacaatcagggtaactgtgggatgtaaccgagcctccaattcaaaataaaaatctttaaaattcttattttatttaaagagggactgtatatccctctttaaaattaagctttagattgctgctgaaagtaataaaaattgtacttttgatcaaacccttcttcgctaccacaaagaaaaataatgaattcaataaatgcgataatagaggggataccagtccagcaaaacaaaatatatagaataccttgtcctactcttcccaaataaaacttatgtattcccagacccccgaagaaaaatgctaataatgccgctacaattttgttcttcttgcttaccatgacttcctcctagctcattgctgccatttttaaaataatgctttcacattataatgcattttccaccagaaatcgcgaaaatttagaaattcttttgagatttttttatttaattgagaaatgaaagctcatataattgaactagatggttttgggaggtgtttattcaaaatgtatggcaaaagattacgtcaattacgaaaggcacacaaattaacaatggaacagttaggcgagaaaattggaattgcaaaatcaagttacggcgggtatgaagctgaaagcaaaaaaccaccattggacaagttgattattttagctaaactatacgatgtttcagttgattacatacttgggttaacagatgatcctgatcctaaaatggaaagaaaaaacctaaaagagtttttagaaaaaccagatattcactgggatggatataaacttacccctgagatgttagatcctatacggaaaattttgaagttggttactgcaaacaacaattaaaaagagcccttatgtgggcatttgcataaaacaattattttatctaaatctaaaaatttggattccaagcaaattcaatgttaccttctgttcttacgactaaatctttgcttaatctctctttgttaaccttatattctttgcagcttaaatattgagcttgtgcaatgaagttatcattacttgacattatgtatcttttgcgatcacttttccttccatactctttaaaaatatccataaatataacatctgctggcatcttaccatactttttatcatgcgttatctctggaaagttttctaaatgtctaaccttgtctatgattcgtacaatttccttcttcacatgacttctacgctttgaattcttcatgtagatctcaattttaaaacgttttaaattgtttgtacttgtgtctctgatatttttaacgatatactcttcttccttaatatcgtgataatgacaatgcaaagtataaattccgctaactgtatcatcatcttgaaaattcgcaccaaaaagactattcctacttattttatcaactaagtattgggcatctataccgttttgaatatatgcaataatatcagctgtatcagttaataagaaagaattaatttgtttgtcgttattaaatgtaaggaaaagcctatcggactcaggatacaacataactaatttaacaaaggtaaatataccaaactgaatcaattcattattagaaggaacttcatatgtagaaaaatagaggttgacttggttgtttatttcatccacattcaaaagattacatcttaaattataagttgacatctcgagttttatccaggattgataaacaatatcggttgtattcgaacaaattgactgagcaatgctcttataattctttacattaaattttacaataccggctagcaatccgttaaccagatcaattattttatatatctgtctcttaaattgagaaacacttacttccttacttttaggttttcctctgttagtgaagttaaagataattttatctttctcttttagataagttcccccatggttaatagcatttctaatatctacatcaatttcctttgttaaaattgtacacccttttgaattaagcaaattgactaaagggcctagattattttgacttaacaagtctttatcatctatggtgttaagcaaattcctcaaaaatttatatagattgctaactactccttcaactaacgaattatataaaggcaaatacttgacttgaatttcagtgtctctcggaattatagttttattaaataaattcaatgtactcagtacacgatcatatgatgaaagggctaaaaaaagttgtctagactgtctctgaagttctcaaaaaacaaatcagtgttaacgttcttgcattttacttcatcaattaagttgtaaataaaatctttaatatctttattccaaaactgtttctcctcatcaaatattaaatcataaattaacggaagccatgtcttaggtatatattgtatcccctcaatattttggtctattctctctttgtacaccttcataactaattcactatcaaaccccatgaaatctaatgatccaaatgcagcttcaacgtaatcactgttcaattattccctctcctagctcctcatttaataaaaggattcttttatcttaatagatgttaaatttacactctccccatctatttttaactgtctcactttctaattttaatttgaatatagctttaatagttcttccactggataactatctgttttatttatctctataaaatattctaactgccaattttgggttttaatagcttgtttgctagtgggattctcccatctagggtaaactcgaattgccatttttccttttgtgtcggatgttttaaggatattttgttttacaagaacttcttttggaaagacaaattgtccgaaattattatttctagtaaaagtgttgataaccaataaatcagttgccttttcatatgaaaaggcttggtttttaccatctccatctttttcccaaaaagaaacaaactgtcctatcttgttaggtgttatttttgcaactctaaatcttaccgattttgaatttaattgaaacatacccgccccatagtctgaattttgagcttcttcctggatagcatttagggttaagcgattaggtttatataaaactttatttacatatgttaacgccttataaaattcattcaatgctttgtttgtactccttatttatcgttgtattgcaacctttttcttatccatcttactcgacccctttcaaaataaagtaaagccaagcaattctgaattatttttatttctttttttgactcttaatttaatccattcttcatcatcagaatatggtttcttggttgttctataccatccgttaaaatgagcaactaactgaatcattattttctcagcttgacctttagagtccatccctaattgtgtaaaaccatttttactacttagcggatctcggtctcctggcttatcaaactgtttaagagctatgtagtatctcctgagtctgtaccaaagagttatagagccaccaaagtgatcccgatagtgattaacattaagttttggtttatagccctttgactttaaatattcggcaatttcttcagcgccaaattcttgacctatttgacctctttctttaagcacattctaaaccccactctgaataaaatgattatttcattactattatactacaattttccatggtcacactaaacaaaaagcagtctattcagatctgctttttattgttttcttcttttaactttttgtttattttgaacccaattaagatattgaaaatagctgctggaagatataaaactcctgcacctattattcctaatgcagtacttgagctcactataaatgtctgcatttctgtgtttcttgacttcaagcaaagtaatactaggaggccagctaaaccccccataagccgtgcaatacctggaataaagaaatctgttaggactccaaataattgccctataattgatagcataatccctaaaaaactggacaataaaactaaatttttaatgtcatttcaccccttttcaaagtatatcatcgggctcgtcatggtcaatcccatatttgcctttgattttctcgttcccacaaccaggattcttttcgactcataacgagctctcactagctgcgctcaatgtttttggtaataataggattttacccaatgataatttcttcccttattttcacaccattcaataaatccctttgattgtttttctgtaaacaacacccagtcatttaacagatcttgataatagttaagtgcttcgttattgttatttcttgtttgttgacattctaccttgttgtttaactgtattgacttaataataagtgctgtatcttctttaatatcgccaaggtacaaatcttcggatatatgatgaaatgaataccaaagtgcgttcaaatttatatcgattagcgttaataaggataattgttcattgctgccaccaagtctaagcgcattgtgtaagtaatcgacacgtttttcagtatttaaaaacacgccataccacctatatggccttggatcttccggattactcttcatccatccctcaagtaaaggctttaaaagttcctcttccaaaggatgaacgagtacatggtgaatatcatctgatgtttcaaataaatcaaatagccaacatgcaaacttctgttgggcattattatcccatatctttgcttcatcaataaaagaagataatgctttaaaggattccttacgtaaccctttttctttgagggagcagaacttttgaaataatggatattcatccaatctgtcacttttcaagatattagttaagatatttaccattgctcacatctctcttcgtttagaatcaagtccatgttatatttagcctttgtaccttgctatatcactaagaataacttgatttccattttcctttttctacacctggatgcatttcaaaatgattttaattgaacttgaaagtgatatgtacaataaactgagttgctatcttcaactataaagtatgtatcttggattaagaaatttgtaaagccaactgttttgagtatcgctttactcctcatgagcatatccatctggatatcattatcagttagaaggtccaaattaatagtaaacgctgtatgtaattcaaagaaagaattatcaaatttaaagtttaagattttcagacaccccccccaccttaccgtttcctttattatacagcgtgatcttatctaattaaaactgctgttttatacagaaaataatgtcctttgttcctttccctctcccgtccattgcagatgctagccacttcatagtttctttaatatagttttaataataaaagcttcatgaaaaaaggtgattttttgcccgcttgaacgccccctcaacatttttaaaaattccatgggcgtttcagtacattctcctttccaagtttttgtttcattgcctaaccattctcccgggtaacgtctttttcagatgacactttaatctctccattctgtgtgaaattgttgtttacttaattagatgccataacaaaaaaagcttcctaacttcagatgctggtacgctttctttcttaatatatgaacataaaacgactacgtgcattctcttgtaaattcaacctttctatatttagaaattttaatattcgaaatttatcctttccctctttacttatatatggaaaaaagtattatttacctaaatgaaaaatagttaaaaacgtagcagaaagaggttattaaatgaaaaagttatttgttacttttcttgtgctaatctccttaaaaagattgcactagtaagtattctctagctaccttgtcaaatgatgactgcaaaacaagctggggactatgtattgtgttcccaagtaaagaagttaaactttattctccaaagagtcctataaaggtagctgtattagatagtgggattaatagctctctgtctatttttgaaaatagttcaataacctcatatgatgctataaaaaacaattccactacaaaagattctttaggccatgatacagccatagcgggtgttattatggctcctttaaataaacaaacagtgcaaggaatatctcctcaagtgaaattattcgatgttaaggttcttaatgataaaggaggtggtgaagtccactctatgaaacaagtaaagtctgaatctgaagaatatgtattttttgagcctattttatgtaaggttaagcataaatttaagactaagcacggtaaactccgcataccttccttcgaatcctggagagtgtaatctctccgttacataactccttagagcctagcttttaaaatccgagtaaaaatttagtacatggatcaattagttgctatcgaataagaactttagtgaattaattgctcatgtcttttataaatttgaattgtccttttttatctaattctaaaaacaaatcaatccgattttgtgaactacttcttcctctaacttcactcattcttcactcatttttgcttgaaacatttcttctgcagatacttcatgagctttagcgatccaataaatatcttttaacagtttttgtgcattattatatgaccagattgtgtatggaaaccgagtttgaattacagcagtttcatcatctggagttgctaccgtatatggtaatgacctgtcaaagatctcagtgtcatagtcataccacaaccagagcatgtcagcagtattatgtatgtaatatcctaagtactctcgttgaaagttcatctgttcactcactgcttttaaatagaataactattttataatctcttcttaataccctccacttaaaatacagtataattgtaacttggatacactaatctatttacatataattacagtgtatttcattaaaaaatcaggagatgattttattgaaaattaaaaaggttattacaagttccctcttattaacgtctttatttatttccgctgctaccgcttatgctacacctgctacctctgttaaaagtcaagatgctatccgaatccaaggagatcaaatggaaatgactgtcgtgagatactacacccaagaagaatcccgtagtatcccttatacgattcaatatgcagagaatggttggtacggaaccttgactgcaactaattggaaacagcaatct
